United States Patent Application Publication US 2021/0115453 A1 - sequence listing, part 3

SEQ ID NO: 10707 - protein, 55 aa, Homo Sapiens
MASPGCLWLLAVALLPWTCASRALQHLDPPAPLPLVIWHGMGERQLLQSLKHGCY

SEQ ID NO: 10708 - protein, 335 aa, Homo Sapiens
MASPGCLWLLAVALLPWTCASRALQHLDPPAPLPLVIWHGMGSRYVAQTGLELLASSNPPASSYQSAGMIGDSCCNPLSMGAIKKMVEKKIPGIYVLSLEIGKTLMEDVENSFFLNVNSQVTTVCQALAKDPKLQQGYNAMGFSQGGQFLRAVAQRCPSPPMINLISVGGQHQGVFGLPRCPGESSHICDFIRKTLNAGAYSKVVQERLVQAEYWHDPIKEDVYRNHSIFLADINQERGINESYKKNLMALKKFVMVKFLNDSIVDPVDSEWFGFYRSGQAKETIPLQETSLYTQDRLGLKEMDNAGQLVFLATEGDHLQLSEEWFYAHIIPFLG

SEQ ID NO: 10709 - protein, 203 aa, Homo Sapiens
MASPGCLWLLAVALLPWTCASRALQHLDPPAPLPLVIWHGMGVFGLPRCPGESSHICDFIRKTLNAGAYSKVVQERLVQAEYWHDPIKEDVYRNHSIFLADINQERGINESYKKNLMALKKFVMVKFLNDSIVDPVDSEWFGFYRSGQAKETIPLQETSLYTQDRLGLKEMDNAGQLVFLATEGDHLQLSEEWFYAHIIPFLG

SEQ ID NO: 10710 - protein, 35 aa, Homo Sapiens
  misc_feature (1)..(1): Xaa can be any naturally occurring amino acid
XLAVALLPWTCASRALQHLDPPAPLPLVIWHGMGE

SEQ ID NO: 10711 - protein, 323 aa, Homo Sapiens
  misc_feature (1)..(1): Xaa can be any naturally occurring amino acid
XLLAVALLPWTCASRALQHLDPPAPLPLVIWHGMGDSCCNPLSMGAIKKMVEKKIPGIYVLSLEIGKTLMEDVENSFFLNVNSQVTTVCQALAKDPKLQQGYNAMGFSQGGQFLRAVAQRCPSPPMINLISVGGQHQGVFGLPRCPGESSHICDFIRKTLNAGAYSKVVQERLVQAEYWHDPIKEDVYRNHSIFLADINQERGINESYKKNLMALKKFVMVKFLNDSIVDPVDSEWFGFYRSGQAKETIPLQETSLYTQVTGRESILGGWCFFSSQFLKLLCSLVLEPFPLHLRALGPPGAKGNGQCRTASVSGYRRGPSSVV

SEQ ID NO: 10712 - protein, 78 aa, Homo Sapiens
  misc_feature (1)..(1): Xaa can be any naturally occurring amino acid
XPPMINLISVGGQHQGVFGLPRCPGESSHICDFIRKTLNAGAYSKVVQERGLDFTEVAKPRKPFPYRRPPCTHRTAWG

SEQ ID NO: 10713 - protein, 308 aa, Homo Sapiens
MKSCGSMLGLCGQRLPAAWVLLLLPFLPLLLLAAPAPHRASYKPVIVVHGLFDSSYSFRHLLEYINETHPGTVVTVLDLFDGRESLRPLWEQVQGFREAVVPIMAKAPQGVHLICYSQGGLVCRALLSVMDDHNVDSFISLSSPQMGQYGDTDYLKWLFPTSMRSNLYRICYSPWGQEFSICNYWHDPHHDDLYLNASSFLALINGERDHPNATVWRKNFLRVGHLVLIGGPDDGVITPWQSSFFGFYDANETVLEMEEQLVYLRDSFGLKTLLARGAIVRCPMAGISHTAWHSNRTLYETCIEPWLS

SEQ ID NO: 10714 - protein, 97 aa, Homo Sapiens
MLGLCGQRLPAAWVLLLLPFLPLLLLAAPAPHRASYKPVIVVHGLFDSSYSFRHLLEYINEGALCAGLCFLSWMITTWILSSPSPLHRWDSMETRTT

SEQ ID NO: 10715 - protein, 158 aa, Homo Sapiens
MLGLCGQRLPAAWVLLLLPFLPLLLLAAPAPHRASYKPVIVVHGLFDSSYSFRHLLEYINEMGQYGDTDYLKWLFPTSMRSNLYRICYSPWGQEFSICNYWHDPHHDDLYLNASSFLALINGERDHPNATVWRKNFLRVGHLVLIGGPDDGVITPWQS

SEQ ID NO: 10716 - protein, 180 aa, Homo Sapiens
MLGLCGQRLPAAWVLLLLPFLPLLLLAAPAPHRASYKPVIVVHGLFDSSYSFRHLLEYINETHPGTVVTVLDLFDGRESLRPLWEQVQGFREAVVPIMAKAPQGVHLICYSQGGLVCRALLSVMDDHNVDSFISLSSPQMGQYGDTDYLKWLFPTSMRSNLYRICYSPWGQEFSICNYWH

SEQ ID NO: 10717 - protein, 302 aa, Homo Sapiens
MLGLCGQRLPAAWVLLLLPFLPLLLLAAPAPHRASYKPVIVVHGLFDSSYSFRHLLEYINETHPGTVVTVLDLFDGRESLRPLWEQVQGFREAVVPIMAKAPQGVHLICYSQGGLVCRALLSVMDDHNVDSFISLSSPQMGQYGDTDYLKWLFPTSMRSNLYRICYSPWGQEFSICNYWHDPHHDDLYLNASSFLALINGERDHPNATVWRKNFLRVGHLVLIGGPDDGVITPWQSSFFGFYDANETVLEMEEQLVYLRDSFGLKTLLARGAIVRCPMAGISHTAWHSNRTLYETCIEPWLS

SEQ ID NO: 10718 - protein, 302 aa, Homo Sapiens; identical to SEQ ID NO: 10717

SEQ ID NO: 10719 - protein, 302 aa, Homo Sapiens; identical to SEQ ID NO: 10717

SEQ ID NO: 10720 - protein, 302 aa, Homo Sapiens; identical to SEQ ID NO: 10717

SEQ ID NO: 10721 - protein, 79 aa, Homo Sapiens
MAAARLCLSLLLLSTCVALLLQPLLGAQGAPLEPVYPGDNATPEQMAQYAADLRRYINMLTRPRPRPMCPGQDGAYRQI

SEQ ID NO: 10722 - protein, 95 aa, Homo Sapiens
MAAARLCLSLLLLSTCVALLLQPLLGAQGAPLEPVYPGDNATPEQMAQYAADLRRYINMLTRPRYGKRHKEDTLAFSEWGSPHAAVPRELSPLDL

SEQ ID NO: 10723 - protein, 95 aa, Homo Sapiens; identical to SEQ ID NO: 10722

SEQ ID NO: 10724 - protein, 105 aa, Homo Sapiens
MAAARLCLSLLLLSTCVALLLQPLLGAQGAPLEPVYPGDNATPEQMAQYAADLRRYINMLTRPSACPCCLFPPRYGKRHKEDTLAFSEWGSPHAAVPRELSPLDL

SEQ ID NO: 10725 - protein, 132 aa, Homo Sapiens
  misc_feature (1)..(1): Xaa can be any naturally occurring amino acid
XQYAADLRRYINMLTRPRCVPQLGREIPAPGTLGPLHIPGHTLSPAPAPAPSRPALGKTGHLCSTGLDQCALGKMVPTGRYETGGLAPGHSACPCCLFPPRYGKRHKEDTLAFSEWGSPHAAVPRELSPLDL

SEQ ID NO: 10726 - protein, 90 aa, Homo Sapiens
MDRRRMALRPGSRRPTAFFFHSRWLVPNLLAFFLGLSGAGPIHLPMPWPNGRRHRVLDPHTQLSTHEAPGRWKPVAPRTMKACPQVLLEW

SEQ ID NO: 10727 - protein, 140 aa, Homo Sapiens
MEPQVRALRCGCWNRDSKRASGGSIQVNPKKSVCGGVHTTNYYGEEDKEDMDRRRMALRPGSRRPTAFFFHSRWLVPNLLAFFLGLSGAGPIHLPMPWPNGRRHRVLDPHTQLSTHEAPGRWKPVAPRTMKACPQVLLEW

SEQ ID NO: 10728 - protein, 188 aa, Homo Sapiens
MVPGAAGWCCLVLWLPACVAAHGFRIHDYLYFQVLSPGDIRYIFTATPAKDFGGIFHTRYEQIHLVPAEPPEACGELSNGFFIQDQIALVERGGCSFLSKTRVVQEHGGRAVIISDNAVDNDSFYVEMIQDSTQRTADIPALFLLGRDGYMIRRSLEQHGLPWAIISIPVNVTSIPTFELLQPPWTFW

SEQ ID NO: 10729 - protein, 151 aa, Homo Sapiens
MRRLLLVTSLVVVLLWEAGAVPAPKVPIKMQVKHWPSEQDPEKAWGARVVEPPEKDDQLVVLFPVQKPKLLTTEEKPRGQGRGPILPGTKAWMETEDTLGHVLSPEPDHDSLYHPPPEEDQGEERPRLWVMPNHQVLLGPEEDQDHIYHPQ

SEQ ID NO: 10730 - protein, 142 aa, Homo Sapiens
MRRLLLVTSLVVVLLWEAGAVPAPKVPIKMQVKHWPSEQDPEKAWGARVVEPPEKDDQLVVLFPVQKPKLLTTEEKPRGTKAWMETEDTLGHVLSPEPDHDSLYHPPPEEDQGEERPRLWVMPNHQVLLGPEEDQDHIYHPQ

SEQ ID NO: 10731 - protein, 178 aa, Homo Sapiens
MLLILLSVALLALSSAQNLNEDVSQEESPSLIAGNPQGPSPQGGNKPQGPPPPPGKPQGPPPQGGNKPQGPPPPGKPQGPPPQGDKSRSPRSPPGKPQGPPPQGGKPQGPPAQGGSKSQSARSPPGKPQGPPQQEGNNPQGPPPPAGGNPQQPQAPPAGQPQGPPRPPQGGRPSRPPQ

SEQ ID NO: 10732 - protein, 198 aa, Homo Sapiens
MLLILLSVALLALSSAQNLNEDVSQEESPSLIAGNPQGPSPQGGNKPQGPPPPPGKPQGPPPQGGNKPQGPPPPGKPQGPPPQGDKSRSPRSPPGKPQGPPPQGGKPQGPPPQGGNKPQGPPPPGKPQGPPAQGGSKSQSARSPPGKPQGPPQQEGNNPQGPPPPAGGNPQQPQAPPAGQPQGPPRPPQGGRPSRPPQ

SEQ ID NO: 10733 - protein, 151 aa, Homo Sapiens
MLLILLSVALLALSSAQNLNEDVSQEESPSLIAGNPQGPSPQGGNKPQGPPPPPGKPQGPPPQGGNKPQGPPPPGKPQGPPPQGDKSRSPRSPPGKPQGPPPQGGNQPQGPPPPPGKPQGPPPQGGNRPQGPPPPGKPQGPPPQGDKSRSP

SEQ ID NO: 10734 - protein, 330 aa, Homo Sapiens
MLLILLSVALLALSSAQNLNEDVSQEESPSLIAGNPQGPSPQGGNKPQGPPPPPGKPQGPPPQGGNKPQGPPPPGKPQGPPPQGDKSRSPRSPPGKPQGPPPQGGNQPQGPPPPPGKPQGPPPQGGNRPQGPPPPGKPQGPPPQGDKSRSPSPPGKPQGPPPQGGNQPQGPPPPPGKPQGPPPQGGKKPQGPPPPGKPQGPPPQGDKSRSSQSPPGKPQGPPPQGGNQPQGPPPPPGKPQGPPPQGGNKPQGPPPPGKPQGPPAQGGSKSQSARSPPGKPQGPPQQEGNNPQGPPPPAGGNPQQPQAPPAGQPQGPPRPPQGGRPSRPPQ

SEQ ID NO: 10735 - protein, 21 aa, Homo Sapiens
MLLILLSVALLALSSAQNLNE

SEQ ID NO: 10736 - protein, 416 aa, Homo Sapiens
MLLILLSVALLALSSAQNLNEDVSQEESPSLIAGNPQGAPPQGGNKPQGPPSPPGKPQGPPPQGGNQPQGPPPPPGKPQGPPPQGGNKPQGPPPPGKPQGPPPQGDKSRSPRSPPGKPQGPPPQGGNQPQGPPPPPGKPQGPPPQGGNKPQGPPPPGKPQGPPPQGDNKSRSSRSPPGKPQGPPPQGGNQPQGPPPPPGKPQGPPPQGGNKPQGPPPPGKPQGPPPQGDNKSQSARSPPGKPQGPPPQGGNQPQGPPPPPGKPQGPPPQGGNKPQGPPPPGKPQGPPPQGGSKSRSSRSPPGKPQGPPPQGGNQPQGPPPPPGKPQGPPPQGGNKPQGPPPPGKPQGPPPQGGSKSRSARSPPGKPQGPPQQEGNNPQGPPPPAGGNPQQPQAPPAGQPQGPPRPPQGGRPSRPPQ

SEQ ID NO: 10737 - protein, 351 aa, Homo Sapiens
MLLILLSVALLALSSAQSLNEDVSQEESPSVISGKPEGRRPQGGNQPQRTPPPPGKPEGRPPQGGNQSQGPPPRPGKPEGPPPQGGNQSQGPPPRPGKPEGQPPQGGNQSQGPPPRPGKPEGPPPQGGNQSQGPPPRPGKPEGPPPQGGNQSQGPPPRPGKPEGPPPQGGNQSQGPPPHPGKPEGPPPQGGNQSQGPPPRPGKPEGPPPQGGNQSQGPPPRPGKPEGPPPQGGNKPQGPPPRPGKPEGPPPQGGNQSQGPPPRPGKPEGPPSQGGNKPQGPPPHPGKPQGPPPQEGNKPQRPPPPGRPQGPPPPGGNPQQPLPPPAGKPQGPPPPPQGGRPHRPPQGQPPQ

SEQ ID NO: 10738 - protein, 309 aa, Homo Sapiens
MLLILLSVALLALSSAQSLNEDVSQEESPSVISGKPEGRRPQGGNQPQRTPPPPGKPEGRPPQGGNQSQGPPPRPGKPEGPPPQGGNQSQGPPPRPGKPEGQPPQGGNQSQGPPPRPGKPEGPPPQGGNQSQGPPPRPGKPEGPPPQGGNQSQGPPPRPGKPEGPPPQGGNQSQGPPPHPGKPEGPPPQGGNQSQGPPPRPGKPEGPPPQGGNQSQGPPPRPGKPEGPPSQGGNKPQGPPPHPGKPQGPPPQEGNKPQRPPPPGRPQGPPPPGGNPQQPLPPPAGKPQGPPPPPQGGRPHRPPQGQPPQ

SEQ ID NO: 10739 - protein, 178 aa, Homo Sapiens
MLLILLSVALLALSSAESSSEDVSQEESLFLISGKPEGRRPQGGNQPQRPPPPPGKPQGPPPQGGNQSQGPPPPPGKPEGRPPQGGNQSQGPPPHPGKPERPPPQGGNQSQGKPQGPPQQEGNKPQGPPPPGKPQGPPPAGGNPQQPQAPPAGKPQGPPPPPQGGRPPRPAQGQQPPQ

SEQ ID NO: 10740 - protein, 178 aa, Homo Sapiens; identical to SEQ ID NO: 10739

SEQ ID NO: 10741 - protein, 247 aa, Homo Sapiens
MLLILLSVALLALSSAESSSEDVSQEESLFLISGKPEGRRPQGGNQPQRPPPPPGKPQGPPPQGGNQSQGPPPPPGKPEGRPPQGGNQSQGPPPHPGKPERPPPQGGNQSQGTPPPPGKPERPPPQGGNQSHRPPPPPGKPERPPPQGGNQSQGPPPHPGKPEGPPPQEGNKSRSARSPPGKPQGPPQQEGNKPQGPPPPGKPQGPPPAGGNPQQPQAPPAGKPQGPPPPPQGGRPPRPAQGQQPPQ

SEQ ID NO: 10742 - protein, 247 aa, Homo Sapiens; identical to SEQ ID NO: 10741

SEQ ID NO: 10743 - protein, 54 aa, Homo Sapiens
MCTTLFLLSTLAMLWRRRFANRVQPEPSDVDGAARGSSLDADPQSSGREKEPLK

SEQ ID NO: 10744 - protein, 54 aa, Homo Sapiens; identical to SEQ ID NO: 10743

SEQ ID NO: 10745 - protein, 164 aa, Homo Sapiens [sequence omitted]

SEQ ID NO: 10746 - protein, 517 aa, Homo Sapiens
MGRRALLLLLLSFLAPWATIALRPALRALGSLHLPTNPTSLPAVAKNYSVLYFQQKALAAGQLHICIIQLNHYKTPLVDHFGFNTVKTFNQRYLVADKYWKKNGGSILFYTGNEGDIIWFCNNTGFMWDVAEELKAMLVFAEHRYYGESLPFGDNSFKDSRHLNFLTSEQALADFAELIKHLKRTIPGAENQPVIAIGGSYGGMLAAWFRMKYPHMVVGALAASAPIWQFEDLVPCGVFMKIVTTDFRKSGPHCSESIHRSWDAINRLSNTGSGLQWLTGALHLCSPLTSQDIQHLKDWISETWVNLAMVDYPYASNFLQPLPAWPIKVVCQYLKNPNVSDSLLLQNIFQALNVYYNYSGQVKCLNISETATSSLGTLGWSYQACTEVVMPFCTNGVDDMFEPHSWNLKELSDDCFQQWGVRPRPSWITTMYGGKNISSHTNIVFSNGELDPWSGGGVTKDITDTLVAVTISEGAHHLDLRTKNALDPMSVLLARSLEVRHMKNWIRDFYDSAGKQH

SEQ ID NO: 10747 - protein, 496 aa, Homo Sapiens
MGRRALLLLLLSFLAPWATIALRPALRALGSLHLPTNPTSLPAVAKNYSVLYFQQKVDHFGFNTVKTFNQRYLVADKYWKKNGGSILFYTGNEGDIIWFCNNTGFMWDVAEELKAMLVFAEHRYYGESLPFGDNSFKDSRHLNFLTSEQALADFAELIKHLKRTIPGAENQPVIAIGGSYGGMLAAWFRMKYPHMVVGALAASAPIWQFEDLVPCGVFMKIVTTDFRKSGPHCSESIHRSWDAINRLSNTGSGLQWLTGALHLCSPLTSQDIQHLKDWISETWVNLAMVDYPYASNFLQPLPAWPIKVVCQYLKNPNVSDSLLLQNIFQALNVYYNYSGQVKCLNISETATSSLGTLGWSYQACTEVVMPFCTNGVDDMFEPHSWNLKELSDDCFQQWGVRPRPSWITTMYGGKNISSHTNIVFSNGELDPWSGGGVTKDITDTLVAVTISEGAHHLDLRTKNALDPMSVLLARSLEVRHMKNWIRDFYDSAGKQH

SEQ ID NO: 10748 - protein, 116 aa, Homo Sapiens
MKVDHFGFNTVKTFNQRYLVADKYWKKNGGSILFYTGNEGDIIWFCNNTGFMWDVAEELKAMLVFAEHRYYGESLPFGDNSFKDSRHLNFLTSEQALADFAELIKHLKRTIPGAEN

SEQ ID NO: 10749 - protein, 26 aa, Homo Sapiens
MWDVAEELKAMLVFAEHRYYGESLPF

SEQ ID NO: 10750 - protein, 43 aa, Homo Sapiens
MWDVAEELKAMLVFAEHRYYGESLPFGDNSFKDSRHLNFLTSE

SEQ ID NO: 10751 - protein, 100 aa, Homo Sapiens
MWDVAEELKAMLVFAEHRYYGESLPFGDNSFKDSRHLNFLTSEQALADFAELIKHLKRTIPGAENQPVIAIGGSYGGMLAAWFRMKYPHMVVGALAASAP

SEQ ID NO: 10752 - protein, 145 aa, Homo Sapiens
MWDVAEELKAMLVFAEHRYYGESLPFGDNSFKDSRHLNFLTSEQALADFAELIKHLKRTIPGAENQPVIAIGGSYGGMLAAWFRMKYPHMVVGALAASAPIWQFEDLVPCGVFMKIVTTDFRKSGPHCSESIHRSWDAINRLSNT

SEQ ID NO: 10753 - protein, 148 aa, Homo Sapiens
MWDVAEELKAMLVFAEHRYYGESLPFGDNSFKDSRHLNFLTSEQALADFAELIKHLKRTIPGAENQPVIAIGGSYGGMLAAWFRMKYPHMVVGALAASAPIWQFEDLVPCGVFMKIVTTDFRKSGPHCSESIHRSWDAINRLSNTGSG

SEQ ID NO: 10754 - protein, 183 aa, Homo Sapiens
MWDVAEELKAMLVFAEHRYYGESLPFGDNSFKDSRHLNFLTSEQALADFAELIKHLKRTIPGAENQPVIAIGGSYGGMLAAWFRMKYPHMVVGALAASAPIWQFEDLVPCGVFMKIVTTDFRKSGPHCSESIHRSWDAINRLSNTGSGLQWLTGALHLCSPLTSQDIQHLKDWISETWVNLAM

SEQ ID NO: 10755 - protein, 192 aa, Homo Sapiens
MWDVAEELKAMLVFAEHRYYGESLPFGDNSFKDSRHLNFLTSEQALADFAELIKHLKRTIPGAENQPVIAIGGSYGGMLAAWFRMKYPHMVVGALAASAPIWQFEDLVPCGVFMKIVTTDFRKSGPHCSESIHRSWDAINRLSNTGSGLQWLTGALHLCSPLTSQDIQHLKDWISETWVNLAMVDYPYASNF

SEQ ID NO: 10756 - protein, 234 aa, Homo Sapiens
MWDVAEELKAMLVFAEHRYYGESLPFGDNSFKDSRHLNFLTSEQALADFAELIKHLKRTIPGAENQPVIAIGGSYGGMLAAWFRMKYPHMVVGALAASAPIWQFEDLVPCGVFMKIVTTDFRKSGPHCSESIHRSWDAINRLSNTGSGLQWLTGALHLCSPLTSQDIQHLKDWISETWVNLAMVDYPYASNFLQPLPAWPIKVVCQYLKNPNVSDSLLLQNIFQALNVYYNYSG

SEQ ID NO: 10757 - protein, 367 aa, Homo Sapiens
MMGSVLPAEALVLKTGLKAPGLALAEVITSDILHSFLYGRWRNVLGEQLFEDKSHHASPKTAFTAEVLAQSFSGEVQKLSSLVLPAEVIIAQSSIPGEGLGIFSKTWIKAGTEMGPFTGRVIAPEHVDICKNNNLMWEVFNEDGTVRYFIDASQEDHRSWMTYIKCARNEQEQNLEVVQIGTSIFYKAIEMIPPDQELLVWYGNSHNTFLGIPGVPGLEEDQKKNKHEDFHPADSAAGPAGRMRCVICHRGFNSRSNLRSHMRIHTLDKPFVCRFCNRRFSQSSTLRNHVRLHTGERPYKCQVCQSAYSQLAGLRAHQKSARHRPPSTALQAHSPALPAPHAHAPALAAAAAAAAAAAAHHLPAMVL

SEQ ID NO: 10758 - protein, 185 aa, Homo Sapiens
MDHRSRLRGTGLNRIPGTQSRAPRVPLPFHVQQEAREGEDWEREPPRQRPPIYEPPESEELPDNVMVSKPAPYWEGTAVIDGEFKELKLTDYRGKYLVFFFYPLDFTFVCPTEIIAFGDRLEEFRSINTEVVACSVDSQFTHLAWINTPRRQGGLGPIRIPLLSDLTHQISKDYGVYLEDSGHTL

SEQ ID NO: 10759 - protein, 271 aa, Homo Sapiens
MEALPLLAATTPDHGRHRRLLLLPLLLFLLPAGAVQGWETEERPRTREEECHFYAGGQVYPGEASRVSVADHSLHLSKAKISKPAPYWEGTAVIDGEFKELKLTDYRGKYLVFFFYPLDFTFVCPTEIIAFGDRLEEFRSINTEVVACSVDSQFTHLAWINTPRRQGGLGPIRIPLLSDLTHQISKDYGVYLEDSGHTLRGLFIIDDKGILRQITLNDLPVGRSVDETLRLVQAFQYTDKHGEVCPAGWKPGSETIIPDPAGKLKYFDKLN

SEQ ID NO: 10760 - protein, 186 aa, Homo Sapiens
MEALPLLAATTPDHGRHRRLLLLPLLLFLLPAGAVQGWETEERPRTREEECHFYAGGQVYPGEASRVSVADHSLHLSKAKISKPAPYWEGTAVIDGEFKELKLTDYRGKYLVFFFYPLDFTFVCPTEIIAFGDRLEEFRSINTEVVACSVDSQFTHLAWSVSYTYIRRKKRMDLLLKHGQITLDMI

SEQ ID NO: 10761 - protein, 161 aa, Homo Sapiens
  misc_feature (1)..(1): Xaa can be any naturally occurring amino acid
XCPTEIIAFGDRLEEFRSINTEVVACSVDSQFTHLAWINTPRRQGGLGPIRIPLLSDLTHQISKDYGVYLEDSGHTLRGLFIIDDKGILRQITLNDLPVGRSVDETLRLVQAFQYTDKHGEVCPAGWKPGSETIKPEDTMKAWWPRESYNPRSSWKAEVFR

SEQ ID NO: 10762 - protein, 382 aa, Homo Sapiens
MRSPLCWLLPLLILASVAQGQPTRRPRPGTGPGRRPRPRPRPTPSFPQPDEPAEPTDLPPPLPPGPPSIFPDCPRECYCPPDFPSALYCDSRNLRKVPVIPPRIHYLYLQNNFITELPVESFQNATGLRWINLDNNRIRKIDQRVLEKLPGLVFLYMEKNQLEEVPSALPRNLEQLRLSQNHISRIPPGVFSKLENLLLLDLQHNRLSDGVFKPDTFHGLKNLMQLNLAHNILRKMPPRVPTAIHQLYLDSNKIETIPNGYFKSFPNLAFIRLNYNKLTDRGLPKNSFNISNLLVLHLSHNRISSVPAINNRLEHLYLNNNSIEKINGTQICPNDLVAFHDFSSDLENVPHLRYLRLDGNYLKPPIPLDLMMCFRLLQSVVI

SEQ ID NO: 10763 - protein, 555 aa, Homo Sapiens
MAARLLLLGILLLLLPLPVPAPCHTAARSECKRSHKFVPGAWLAGEGVDVTSLRRSGSFPVDTQRFLRPDGTCTLCENALQEGTLQRLPLALTNWRAQGSGCQRHVTRAKVSSTEAVARDAARSIRNDWKVGLDVTPKPTSNVHVSVAGSHSQAANFAAQKTHQDQYSFSTDTVECRFYSFHVVHTPPLHPDFKRALGDLPHHFNASTQPAYLRLISNYGTHFIRAVELGGRISALTALRTCELALEGLTDNEVEDCLTVEAQVNIGIHGSISAEAKACEEKKKKHKMTASFHQTYRERHSEVVGGHHTSINDLLFGIQAGPEQYSAWVNSLPGSPGLVDYTLEPLHVLLDSQDPRREALRRALSQYLTDRARWRDCSRPCPPGRQKSPRDPCQCVCHGSAVTTQDCCPRQRGLAQLEVTFIQAWGLWGDWFTATDAYVKLFFGGQELRTSTVWDNNNPIWSVRLDFGDVLLATGGPLRLQVWDQDSGRDDDLLGTCDQAPKSGSHEVRCNLNHGHLKFRYHARCLPHLGGGTCLDYVPQMLLGEPPGNRSGAVW

SEQ ID NO: 10764 - protein, 555 aa, Homo Sapiens; identical to SEQ ID NO: 10763

SEQ ID NO: 10765 - protein, 232 aa, Homo Sapiens
MAARLLLLGILLLLLPLPVPAPCHTAARSECKRSHKFVPGAWLAGEGVDVTSLRRSGSFPVDTQRFLRPDGTCTLCENALQEGTLQRLPLALTNWRAQGSGCQRHVTRAKVSSTEAVARDAARSIRNDWKVGLDVTPKPTSNVHVSVAGSHSQAANFAAQKTHQDQYSFSTDTVECRFYSSSAIVSASGFYMWPNTILLPTWPREAKRLDTHQTDGKGRFRLFFREVAGFTR

SEQ ID NO: 10766 - protein, 211 aa, Homo Sapiens
MKLPLLLALLFGAVSALHLRSETSTFETPLGAKTLPEDEETPEQEMEETPCRELEEEEEWGSGSEDASKKDGAVESISVPDMVDKNLTCPEEEDTVKVVGIPGCQTCRYLLFTCRRCYRGNLVSIHNFNINYRIQCSVSALNQGQVWIGGRITGSGRCRRFQWVDGSRWNFAYWAAHQPWSRGGHCVALCTRGGHWRRAHCLRRLPFICSY

SEQ ID NO: 10767 - protein, 222 aa, Homo Sapiens
MKLPLLLALLFGAVSALHLRSETSTFETPLGAKTLPEDEETPEQEMEETPCRELEEEEEWGSGSEDASKKDGAVESISVPDMVDKNLTCPEEEDTVKVVGIPGCQTCRYLLVRSLQTFSQAWFTCRRCYRGNLVSIHNFNINYRIQCSVSALNQGQVWIGGRITGSGRCRRFQWVDGSRWNFAYWAAHQPWSRGGHCVALCTRGGHWRRAHCLRRLPFICSY

SEQ ID NO: 10768 - protein, 222 aa, Homo Sapiens; identical to SEQ ID NO: 10767

SEQ ID NO: 10769 - protein, 225 aa, Homo Sapiens
MQCLLLLPFLLLGTVSALHLENDAPHLESLETQADLGQDLDSSKEQERDLALTEEVIQAEGEEVKASACQDNFEDEEAMESDPAALDKDFQCPREEDIVEVQGSPRCKICRYLLVRTPKTFAEAQNVCSRCYGGNLVSIHDFNFNYRIQCCTSTVNQAQVWIGGNLRGWFLWKRFCWTDGSHWNFAYWSPGQPGNGQGSCVALCTKGGYWRRAQCDKQLPFVCSF

SEQ ID NO: 10770 - protein, 1404 aa, Homo Sapiens
MAWKTLPIYLLLLLSVFVIQQVSSQDLSSCAGRCGEGYSRDATCNCDYNCQHYMECCPDFKRVCTAELSCKGRCFESFERGRECDCDAQCKKYDKCCPDYESFCAEVHNPTSPPSSKKAPPPSGASQTIKSTTKRSPKPPNKKKTKKVIESEEITEEHSVSENQESSSSSSSSSSSSTIRKIKSSKNSAANRELQKKLKVKDNKKNRTKKKPTPKPPVVDEAGSGLDNGDFKVTTPDTSTTQHNKVSTSPKITTAKPINPRPSLPPNSDTSKETSLTVNKETTVETKETTTTNKQTSTDGKEKTTSAKETQSIEKTSAKDLAPTSKVLAKPTPKAETTTKGPALTTPKEPTPTTPKEPASTTPKEPTPTTIKSAPTTPKEPAPTTTKSAPTTPKEPAPTTTKEPAPTTPKEPAPTTTKEPAPTTTKSAPTTPKEPAPTTPKKPAPTTPKEPAPTTPKEPTPTTPKEPAPTTKEPAPTTPKEPAPTAPKKPAPTTPKEPAPTTPKEPAPTTTKEPSPTTPKEPAPTTTKSAPTTTKEPAPTTTKSAPTTPKEPSPTTTKEPAPTTPKEPAPTTPKKPAPTTPKEPAPTTPKEPAPTTTKKPAPTTPKEPAPTTPKETAPTTPKKLTPTTPEKLAPTTPEKPAPTTPEELAPTTPEEPTPTTPEEPAPTTPKAAAPNTPKEPAPTTPKEPAPTTPKEPAPTTPKETAPTTPKGTAPTTLKEPAPTTPKKPAPKELAPTTTKEPTSTTSDKPAPTTPKGTAPTTPKEPAPTTPKEPAPTTPKGTAPTTLKEPAPTTPKKPAPKELAPTTTKGPTSTTSDKPAPTTPKETAPTTPKEPAPTTPKKPAPTTPETPPPTTSEVSTPTTTKEPTTIHKSPDESTPELSAEPTPKALENSPKEPGVPTTKTPAATKPEMTTTAKDKTTERDLRTTPETTTAAPKMTKETATTTEKTTESKITATTTQVTSTTTQDTTPFKITTLKTTTLAPKVTTTKKTITTTEIMNKPEETAKPKDRATNSKATTPKPQKPTKAPKKPTSTKKPKTMPRVRKPKTTPTPRKMTSTMPELNPTSRIAEAMLQTTTRPNQTPNSKLVEVNPKSEDAGGAEGETPHMLLRPHVFMPEVTPDMDYLPRVPNQGIIINPMLSDETNICNGKPVDGLTTLRNGTLVAFRGHYFWMLSPFSPPSPARRITEVWGIPSPIDTVFTRCNCEGKTFFFKDSQYWRFTNDIKDAGYPKPIFKGFGGLTGQIVAALSTAKYKNWPESVYFFKRGGSIQQYIYKQEPVQKCPGRRPALNYPVYGETTQVRRRRFERAIGPSQTHTIRIQYSPARLAYQDKGVLHNEVKVSILWRGLPNVVTSAISLPNIRKPDGYDYYAFSKDQYYNIDVPSRTARAITTRSGQTLSKVWYNCP

SEQ ID NO: 10771 - protein, 1361 aa, Homo Sapiens
MAWKTLPIYLLLLLSVFVIQQVSSQDLSSCAGRCGEGYSRDATCNCDYNCQHYMECCPDFKRVCTAELSCKGRCFESFERGRECDCDAQCKKYDKCCPDYESFCAEVHNPTSPPSSKKAPPPSGASQTIKSTTKRSPKPPNKKKTKKVIESEEITEVKDNKKNRTKKKPTPKPPVVDEAGSGLDNGDFKVTTPDTSTTQHNKVSTSPKITTAKPINPRPSLPPNSDTSKETSLTVNKETTVETKETTTTNKQTSTDGKEKTTSAKETQSIEKTSAKDLAPTSKVLAKPTPKAETTTKGPALTTPKEPTPTTPKEPASTTPKEPTPTTIKSAPTTPKEPAPTTTKSAPTTPKEPAPTTTKEPAPTTPKEPAPTTTKEPAPTTTKSAPTTPKEPAPTTPKKPAPTTPKEPAPTTPKEPTPTTPKEPAPTTKEPAPTTPKEPAPTAPKKPAPTTPKEPAPTTPKEPAPTTTKEPSPTTPKEPAPTTTKSAPTTTKEPAPTTTKSAPTTPKEPSPTTTKEPAPTTPKEPAPTTPKKPAPTTPKEPAPTTPKEPAPTTTKKPAPTTPKEPAPTTPKETAPTTPKKLTPTTPEKLAPTTPEKPAPTTPEELAPTTPEEPTPTTPEEPAPTTPKAAAPNTPKEPAPTTPKEPAPTTPKEPAPTTPKETAPTTPKGTAPTTLKEPAPTTPKKPAPKELAPTTTKEPTSTTSDKPAPTTPKGTAPTTPKEPAPTTPKEPAPTTPKGTAPTTLKEPAPTTPKKPAPKELAPTTTKGPTSTTSDKPAPTTPKETAPTTPKEPAPTTPKKPAPTTPETPPPTTSEVSTPTTTKEPTTIHKSPDESTPELSAEPTPKALENSPKEPGVPTTKTPAATKPEMTTTAKDKTTERDLRTTPETTTAAPKMTKETATTTEKTTESKITATTTQVTSTTTQDTTPFKITTLKTTTLAPKVTTTKKTITTTEIMNKPEETAKPKDRATNSKATTPKPQKPTKAPKKPTSTKKPKTMPRVRKPKTTPTPRKMTSTMPELNPTSRIAEAMLQTTTRPNQTPNSKLVEVNPKSEDAGGAEGETPHMLLRPHVFMPEVTPDMDYLPRVPNQGIIINPMLSDETNICNGKPVDGLTTLRNGTLVAFRGHYFWMLSPFSPPSPARRITEVWGIPSPIDTVFTRCNCEGKTFFFKDSQYWRFTNDIKDAGYPKPIFKGFGGLTGQIVAALSTAKYKNWPESVYFFKRGGSIQQYIYKQEPVQKCPGRRPALNYPVYGETTQVRRRRFERAIGPSQTHTIRIQYSPARLAYQDKGVLHNEVKVSILWRGLPNVVTSAISLPNIRKPDGYDYYAFSKDQYYNIDVPSRTARAITTRSGQTLSKVWYNCP

SEQ ID NO: 10772 - protein, 1311 aa, Homo Sapiens
MAWKTLPIYLLLLLSVFVIQQVSSQDLSSCAGRCGEGYSRDATCNCDYNCQHYMECCPDFKRVCTAELSCKGRCFESFERGRECDCDAQCKKYDKCCPDYESFCAEVKDNKKNRTKKKPTPKPPVVDEAGSGLDNGDFKVTTPDTSTTQHNKVSTSPKITTAKPINPRPSLPPNSDTSKETSLTVNKETTVETKETTTTNKQTSTDGKEKTTSAKETQSIEKTSAKDLAPTSKVLAKPTPKAETTTKGPALTTPKEPTPTTPKEPASTTPKEPTPTTIKSAPTTPKEPAPTTTKSAPTTPKEPAPTTTKEPAPTTPKEPAPTTTKEPAPTTTKSAPTTPKEPAPTTPKKPAPTTPKEPAPTTPKEPTPTTPKEPAPTTKEPAPTTPKEPAPTAPKKPAPTTPKEPAPTTPKEPAPTTTKEPSPTTPKEPAPTTTKSAPTTTKEPAPTTTKSAPTTPKEPSPTTTKEPAPTTPKEPAPTTPKKPAPTTPKEPAPTTPKEPAPTTTKKPAPTTPKEPAPTTPKETAPTTPKKLTPTTPEKLAPTTPEKPAPTTPEELAPTTPEEPTPTTPEEPAPTTPKAAAPNTPKEPAPTTPKEPAPTTPKEPAPTTPKETAPTTPKGTAPTTLKEPAPTTPKKPAPKELAPTTTKEPTSTTSDKPAPTTPKGTAPTTPKEPAPTTPKEPAPTTPKGTAPTTLKEPAPTTPKKPAPKELAPTTTKGPTSTTSDKPAPTTPKETAPTTPKEPAPTTPKKPAPTTPETPPPTTSEVSTPTTTKEPTTIHKSPDESTPELSAEPTPKALENSPKEPGVPTTKTPAATKPEMTTTAKDKTTERDLRTTPETTTAAPKMTKETATTTEKTTESKITATTTQVTSTTTQDTTPFKITTLKTTTLAPKVTTTKKTITTTEIMNKPEETAKPKDRATNSKATTPKPQKPTKAPKKPTSTKKPKTMPRVRKPKTTPTPRKMTSTMPELNPTSRIAEAMLQTTTRPNQTPNSKLVEVNPKSEDAGGAEGETPHMLLRPHVFMPEVTPDMDYLPRVPNQGIIINPMLSDETNICNGKPVDGLTTLRNGTLVAFRGHYFWMLSPFSPPSPARRITEVWGIPSPIDTVFTRCNCEGKTFFFKDSQYWRFTNDIKDAGYPKPIFKGFGGLTGQIVAALSTAKYKNWPESVYFFKRGGSIQQYIYKQEPVQKCPGRRPALNYPVYGETTQVRRRRFERAIGPSQTHTIRIQYSPARLAYQDKGVLHNEVKVSILWRGLPNVVTSAISLPNIRKPDGYDYYAFSKDQYYNIDVPSRTARAITTRSGQTLSKVWYNCP

SEQ ID NO: 10773 - protein, 162 aa, Homo Sapiens
MAWKTLPIYLLLLLSVFVIQQVSSQELSCKGRCFESFERGRECDCDAQCKKYDKCCPDYESFCAEEHSVSENQESSSSSSSSSSSSTIRKIKSSKNSAANRELQKKLKVKDNKKNRTKKKPTPKPPVVDEAGSGLDNGDFKVTTPDTSTTQHNKVSTSPKIT

SEQ ID NO: 10774 - protein, 1363 aa, Homo Sapiens
MAWKTLPIYLLLLLSVFVIQQVSSQELSCKGRCFESFERGRECDCDAQCKKYDKCCPDYESFCAEVHNPTSPPSSKKAPPPSGASQTIKSTTKRSPKPPNKKKTKKVIESEEITEEHSVSENQESSSSSSSSSSSSTIRKIKSSKNSAANRELQKKLKVKDNKKNRTKKKPTPKPPVVDEAGSGLDNGDFKVTTPDTSTTQHNKVSTSPKITTAKPINPRPSLPPNSDTSKETSLTVNKETTVETKETTTTNKQTSTDGKEKTTSAKETQSIEKTSAKDLAPTSKVLAKPTPKAETTTKGPALTTPKEPTPTTPKEPASTTPKEPTPTTIKSAPTTPKEPAPTTTKSAPTTPKEPAPTTTKEPAPTTPKEPAPTTTKEPAPTTTKSAPTTPKEPAPTTPKKPAPTTPKEPAPTTPKEPTPTTPKEPAPTTKEPAPTTPKEPAPTAPKKPAPTTPKEPAPTTPKEPAPTTTKEPSPTTPKEPAPTTTKSAPTTTKEPAPTTTKSAPTTPKEPSPTTTKEPAPTTPKEPAPTTPKKPAPTTPKEPAPTTPKEPAPTTTKKPAPTTPKEPAPTTPKETAPTTPKKLTPTTPEKLAPTTPEKPAPTTPEELAPTTPEEPTPTTPEEPAPTTPKAAAPNTPKEPAPTTPKEPAPTTPKEPAPTTPKETAPTTPKGTAPTTLKEPAPTTPKKPAPKELAPTTTKEPTSTTSDKPAPTTPKGTAPTTPKEPAPTTPKEPAPTTPKGTAPTTLKEPAPTTPKKPAPKELAPTTTKGPTSTTSDKPAPTTPKETAPTTPKEPAPTTPKKPAPTTPETPPPTTSEVSTPTTTKEPTTIHKSPDESTPELSAEPTPKALENSPKEPGVPTTKTPAATKPEMTTTAKDKTTERDLRTTPETTTAAPKMTKETATTTEKTTESKITATTTQVTSTTTQDTTPFKITTLKTTTLAPKVTTTKKTITTTEIMNKPEETAKPKDRATNSKATTPKPQKPTKAPKKPTSTKKPKTMPRVRKPKTTPTPRKMTSTMPELNPTSRIAEAMLQTTTRPNQTPNSKLVEVNPKSEDAGGAEGETPHMLLRPHVFMPEVTPDMDYLPRVPNQGIIINPMLSDETNICNGKPVDGLTTLRNGTLVAFRGHYFWMLSPFSPPSPARRITEVWGIPSPIDTVFTRCNCEGKTFFFKDSQYWRFTNDIKDAGYPKPIFKGFGGLTGQIVAALSTAKYKNWPESVYFFKRGGSIQQYIYKQEPVQKCPGRRPALNYPVYGETTQVRRRRFERAIGPSQTHTIRIQYSPARLAYQDKGVLHNEVKVSILWRGLPNVVTSAISLPNIRKPDGYDYYAFSKDQYYNIDVPSRTARAITTRSGQTLSKVWYNCP

SEQ ID NO: 10775 - protein, 854 aa, Homo Sapiens [sequence omitted]

SEQ ID NO: 10776 - protein, 140 aa, Homo Sapiens
GPPLGGQQSQPSAGDGNQDDGPQQGPPQQGGQQQQGPPPPQGKPQGPPQQGGQQQQGPPPPQGKPQGPPQQGGHPPPPQGRPQGPPQQGGHPRPPRGRPQGPPQQGGHQQGPPPPPPGKPQGPPPQGGRPQGPPQGQSPQ

SEQ ID NO: 10777 - protein, 175 aa, Homo Sapiens
MLLILLSVALLAFSSAQDLNEDGGDSEQFLDEERQGPPLGGQQSQPSAGDGNQDDGPQQGPPQQGGQQQQGPPPPQGKPQGPPQQGGQQQQGPPPPQGKPQGPPQQGGHPPPPQGRPQGPPQQGGHPRPPRGRPQGPPQQGGHQQGPPPPPPGKPQGPPPQGGRPQGPPQGQSPQ

SEQ ID NO: 10778 - protein, 187 aa, Homo Sapiens
MLLILLSVALLAFSSAQDLNEDVSQEDVPLVISDGGDSEQFLDEERQGPPLGGQQSQPSAGDGNQDDGPQQGPPQQGGQQQQGPPPPQGKPQGPPQQGGQQQQGPPPPQGKPQGPPQQGGHPPPPQGRPQGPPQQGGHPRPPRGRPQGPPQQGGHQQGPPPPPPGKPQGPPPQGGRPQGPPQGQSPQ

SEQ ID NO: 10779 - protein, 166 aa, Homo Sapiens
MLLILLSVALLAFSSAQDLDEDVSQEDVPLVISDGGDSEQFIDEERQGPPLGGQQSQPSAGDGNQNDGPQQGPPQQGGQQQQGPPPPQGKPQGPPQQGGHPPPPQGRPQGPPQQGGHPRPPRGRPQGPPQQGGHQQGPPPPPPGKPQGPPPQGGRPQGPPQGQSPQ

SEQ ID NO: 10780 - protein, 166 aa, Homo Sapiens; identical to SEQ ID NO: 10779

SEQ ID NO: 10781 - protein, 82 aa, Homo Sapiens
METVISSDSSPAVENEHPQETPESNNSVYTSFMKSHRCYDLIPTSSKLVVFDTSLQSCPCGFAFMIITVLATGEESFFCFGD

SEQ ID NO: 10782 - protein, 331 aa, Homo Sapiens
METVISSDSSPAVENEHPQETPESNNSVYTSFMKSHRCYDLIPTSSKLVVFDTSLQVKKAFFALVTNGVRAAPLWDSKKQSFVGMLTITDFINILHRYYKSALVQIYELEEHKIETWREVYLQDSFKPLVCISPNASLFDAVSSLIRNKIHRLPVIDPESGNTLYILTHKRILKFLKLFITEFPKPEFMSKSLEELQIGTYANIAMVRTTTPVYVALGIFVQHRVSALPVVDEKGRVVDIYSKFDVINLAAEKTYNNLDVSVTKALQHRSHYFEGVLKCYLHETLETIINRLVEAEVHRLVVVDENDVVKGIVSLSDILQALVLTGGEKKP

SEQ ID NO: 10783 - protein, 340 aa, Homo Sapiens
METVISSDSSPAVENEHPQETPESNNSVYTSFMKSHRCYDLIPTSSKLVVFDTSLQVKKAFFALVTNGVRAAPLWDSKKQSFVVLRALSCPLGMLTITDFINILHRYYKSALVQIYELEEHKIETWREVYLQDSFKPLVCISPNASLFDAVSSLIRNKIHRLPVIDPESGNTLYILTHKRILKFLKLFITEFPKPEFMSKSLEELQIGTYANIAMVRTTTPVYVALGIFVQHRVSALPVVDEKGRVVDIYSKFDVINLAAEKTYNNLDVSVTKALQHRSHYFEGVLKCYLHETLETIINRLVEAEVHRLVVVDENDVVKGIVSLSDILQALVLTGGEKKP

SEQ ID NO: 10784 - protein, 43 aa, Homo Sapiens
MFSLTGVMVISSDSSPAVENEHPQETPESNNSVYTSFMKSHRC

SEQ ID NO: 10785 - protein, 69 aa, Homo Sapiens
MKSHRCYDLIPTSSKLVVFDTSLQVKKAFFALVTNGVRAAPLWDSKKQSFVGMLTITDFINILHRYYKS

SEQ ID NO: 10786 - protein, 82 aa, Homo Sapiens
MKSHRCYDLIPTSSKLVVFDTSLQVKKAFFALVTNGVRAAPLWDSKKQSFVGMLTITDFINILHRYYKSALVQIYELEEHKI

SEQ ID NO: 10787 - protein, 125 aa, Homo Sapiens
MKSHRCYDLIPTSSKLVVFDTSLQVKKAFFALVTNGVRAAPLWDSKKQSFVGMLTITDFINILHRYYKSALVQIYELEEHKIETWREVYLQDSFKPLVCISPNASLFDAVSSLIRNKIHRLPVID

SEQ ID NO: 10788 - protein, 161 aa, Homo Sapiens
MKSHRCYDLIPTSSKLVVFDTSLQVKKAFFALVTNGVRAAPLWDSKKQSFVGMLTITDFINILHRYYKSALVQIYELEEHKIETWREVYLQDSFKPLVCISPNASLFDAVSSLIRNKIHRLPVIDPESGNTLYILTHKRILKFLKLFITEFPKPEFMSKSL

SEQ ID NO: 10789 - protein, 299 aa, Homo Sapiens
MKSHRCYDLIPTSSKLVVFDTSLQVKKAFFALVTNGVRAAPLWDSKKQSFVGMLTITDFINILHRYYKSALVQIYELEEHKIETWREVYLQDSFKPLVCISPNASLFDAVSSLIRNKIHRLPVIDPESGNTLYILTHKRILKFLKLFITEFPKPEFMSKSLEELQIGTYANIAMVRTTTPVYVALGIFVQHRVSALPVVDEKGRVVDIYSKFDVINLAAEKTYNNLDVSVTKALQHRSHYFEGVLKCYLHETLETIINRLVEAEVHRLVVVDENDVVKGIVSLSDILQALVLTGGEKKP

SEQ ID NO: 10790 - protein, 28 aa, Homo Sapiens
MLTITDFINILHRYYKSALVQIYELEEH

SEQ ID NO: 10791 - protein, 145 aa, Homo Sapiens
MLTITDFINILHRYYKSALVQIYELEEHKIETWREVYLQDSFKPLVCISPNASLFDAVSSLIRNKIHRLPVIDPESGNTLYILTHKRILKFLKLFITEFPKPEFMSKSLEELQIGTYANIAMVRTTTPVYVALGIFVQHRVSALP

SEQ ID NO: 10792 - protein, 203 aa, Homo Sapiens [sequence omitted]

SEQ ID NO: 10793 - protein, 280 aa, Homo Sapiens
MSILKVKKAFFALVTNGVRAAPLWDSKKQSFVGMLTITDFINILHRYYKSALVQIYELEEHKIETWREVYLQDSFKPLVCISPNASLFDAVSSLIRNKIHRLPVIDPESGNTLYILTHKRILKFLKLFITEFPKPEFMSKSLEELQIGTYANIAMVRTTTPVYVALGIFVQHRVSALPVVDEKGRVVDIYSKFDVINLAAEKTYNNLDVSVTKALQHRSHYFEGVLKCYLHETLETIINRLVEAEVHRLVVVDENDVVKGIVSLSDILQALVLTGGEKKP

SEQ ID NO: 10794 - protein, 251 aa, Homo Sapiens
NSVYTSFMKSHRCYDLIPTSSKLVVFDTSLQVKKAFFALVTNGVRAAPLWDSKKQSFVGMLTITDFINILHRYYKSALVQIYELEEHKIETWREVYLQDSFKPLVCISPNARSLSSPSQSSCPSLWKSYRLAPMPILLWFALPPPSMWLWGFLYSIESQPCQWWMRRNLAAEKTYNNLDVSVTKALQHRSHYFEGVLKCYLHETLETIINRLVEAEVHRLVVVDENDVVKGIVSLSDILQALVLTGGEKKP

SEQ ID NO: 10795 - protein, 93 aa, Homo Sapiens
RVVDIYSKFDVINLAAEKTYNNLDVSVTKALQHRSHYFEGVLKCYLHETLETIINRLVEAEVHRLVVVDENDVVKGICPTHCLLEALWESDET

SEQ ID NO: 10796 - protein, 200 aa, Homo Sapiens
AEEEEEEEDSEVQGEQPKPASPAEEDKMPPYDEQTQAFIDAAQEARNKFEEAERSLKDMEESIRNLEQEISFDFGPNGEFAYLYSQCYELTTNEYVYRLCPFKLVSQKPKLGGSPTSLGTWGSWIGPDHDKFSAMKYEQGTGCWQGPNRSTTVRLLCGKETMVTSTTEPSRCEYLMELMTPAACPEPPPEAPTEDDHDEL

SEQ ID NO: 10797 - protein, 62 aa, Homo Sapiens
MLLPLLLLLPMCWAVEVKRPRGVSLTNHHFYDESKPFTCLDGSATIPFDQVNDDYCDCKDGS

SEQ ID NO: 10798 - protein, 140 aa, Homo Sapiens
MLLPLLLLLPMCWAVEVKRPRGVSLTNHHFYDESKPFTCLDGSATIPFDQVNDDYCDCKDGSDEPGTAACPNGSFHCTNTGYKPLYIPSNRVNDGVCDCCDGTDEYNSGVICENTCKEKGRKERESLQQMAEVTREGFRL

SEQ ID NO: 10799 - protein, 144 aa, Homo Sapiens
MLLPLLLLLPMCWAVEVKRPRGVSLTNHHFYDESKPFTCLDGSATIPFDQVNDDYCDCKDGSDEPGTAACPNGSFHCTNTGYKPLYIPSNRVNDGVCDCCDGTDEYNSGVICENTCKEKGRKERESLQQMAEVTREGFRLKKIL

SEQ ID NO: 10800 - protein, 168 aa, Homo Sapiens
MLLPLLLLLPMCWAVEVKRPRGVSLTNHHFYDESKPFTCLDGSATIPFDQVNDDYCDCKDGSDEPGTAACPNGSFHCTNTGYKPLYIPSNRVNDGVCDCCDGTDEYNSGVICENTCKEKGRKERESLQQMAEVTREGFRLKKILIEDWKKAREEKQKKLIELQAGKKS

SEQ ID NO: 10801 - protein, 535 aa, Homo Sapiens
MLLPLLLLLPMCWAVEVKRPRGVSLTNHHFYDESKPFTCLDGSATIPFDQVNDDYCDCKDGSDEPGTAACPNGSFHCTNTGYKPLYIPSNRVNDGVCDCCDGTDEYNSGVICENTCKEKGRKERESLQQMAEVTREGFRLKKILIEDWKKAREEKQKKLIELQAGKKSLEDQVEMLRTVKEEAEKPEREAKEQHQKLWEEQLAAAKAQQEQELAADAFKELDDDMDGTVSVTELQTHPELDTDGDGALSEAEAQALLSGDTQTDATSFYDRVWAAIRDKYRSEALPTDLPAPSAPDLTEPKEEQPPVPSSPTEEEEEEEEEEEEEAEEEEEEEDSEVQGEQPKEAPPPLSPPQPASPAEEDKMPPYDEQTQAFIDAAQEARNKFEEAERSLKDMEESIRNLEQEISFDFGPNGEFAYLYSQCYELTTNEYVYRLCPFKLVSQKPKLGGSPTSLGTWGSWIGPDHDKFSAMKYEQGTGCWQGPNRSTTVRLLCGKETMVTSTTEPSRCEYLMELMTPAACPEPPPEAPTEDDHDEL

SEQ ID NO: 10802 - protein, 528 aa, Homo Sapiens
MLLPLLLLLPMCWAVEVKRPRGVSLTNHHFYDESKPFTCLDGSATIPFDQVNDDYCDCKDGSDEPGTAACPNGSFHCTNTGYKPLYIPSNRVNDGVCDCCDGTDEYNSGVICENTCKEKGRKERESLQQMAEVTREGFRLKKILIEDWKKAREEKQKKLIELQAGKKSLEDQVEMLRTVKEEAEKPEREAKEQHQKLWEEQLAAAKAQQEQELAADAFKELDDDMDGTVSVTELQTHPELDTDGDGALSEAEAQALLSGDTQTDATSFYDRVWAAIRDKYRSEALPTDLPAPSAPDLTEPKEEQPPVPSSPTEEEEEEEEEEEEEAEEEEEEEDSEEAPPPLSPPQPASPAEEDKMPPYDEQTQAFIDAAQEARNKFEEAERSLKDMEESIRNLEQEISFDFGPNGEFAYLYSQCYELTTNEYVYRLCPFKLVSQKPKLGGSPTSLGTWGSWIGPDHDKFSAMKYEQGTGCWQGPNRSTTVRLLCGKETMVTSTTEPSRCEYLMELMTPAACPEPPPEAPTEDDHDEL

SEQ ID NO: 10803 - protein, 525 aa, Homo Sapiens
MLLPLLLLLPMCWAVEVKRPRGVSLTNHHFYDESKPFTCLDGSATIPFDQVNDDYCDCKDGSDEPGTAACPNGSFHCTNTGYKPLYIPSNRVNDGVCDCCDGTDEYNSGVICENTCKEKGRKERESLQQMAEVTREGFRLKKILIEDWKKAREEKQKKLIELQAGKKSLEDQVEMLRTVKEEAEKPEREAKEQHQKLWEEQLAAAKAQQEQELAADAFKELDDDMDGTVSVTELQTHPELDTDGDGALSEAEAQALLSGDTQTDATSFYDRVWAAIRDKYRSEALPTDLPAPSAPDLTEPKEEQPPVPSSPTEEEEEEEEEEEEEAEEEEEEEDSEVQGEQPKPASPAEEDKMPPYDEQTQAFIDAAQEARNKFEEAERSLKDMEESIRNLEQEISFDFGPNGEFAYLYSQCYELTTNEYVYRLCPFKLVSQKPKLGGSPTSLGTWGSWIGPDHDKFSAMKYEQGTGCWQGPNRSTTVRLLCGKETMVTSTTEPSRCEYLMELMTPAACPEPPPEAPTEDDHDEL

SEQ ID NO: 10804 - protein, 525 aa, Homo Sapiens; identical to SEQ ID NO: 10803

SEQ ID NO: 10805 - protein, 132 aa, Homo Sapiens
MLLPLLLLLPMCWAVEVKRPRGVSLTSESSCSPSRQAGGGRGQHWALGIGIYSLLTQFPGSAPLVGMGGQRWYLVEKALTCPGLSFLYPADHHFYDESKPFTCLDGSATIPFDQVNDDYCDCKDGSDEPGTA

SEQ ID NO: 10806 - protein, 80 aa, Homo Sapiens
EVLRNKGYNRSLDMWSVGVIIYVSLSGTFPFNEDEDIHDQIQNAAFMYPPNPWKEISHEDVDLIQYNTYILGCLSSHCTA

SEQ ID NO: 10807 - protein, 117 aa, Homo Sapiens
MILSPPQPCGTFPECGFYGMYDKILLFRHDPTSENILQLVKAASDIQEGDLIEVVLSASATFEDFQIRPHALFVHSYRAPAFCDHCGEMLWGLVRQGLKCEGCGLNYHKRCAFKIPN

SEQ ID NO: 10808 - protein, 912 aa, Homo Sapiens
MSAPPVLRPPSPLLPVAAAAAAAAAALVPGSGPGPAPFLAPVAAPVGGISFHLQIGLSREPVLLLQDSSGDYSLAHVREMACSIVDQKFPECGFYGMYDKILLFRHDPTSENILQLVKAASDIQEGDLIEVVLSASATFEDFQIRPHALFVHSYRAPAFCDHCGEMLWGLVRQGLKCEGCGLNYHKRCAFKIPNNCSGVRRRRLSNVSLTGVSTIRTSSAELSTSAPDEPLLQKSPSESFIGREKRSNSQSYIGRPIHLDKILMSKVKVPHTFVIHSYTRPTVCQYCKKLLKGLFRQGLQCKDCRFNCHKRCAPKVPNNCLGEVTINGDLLSPGAESDVVMEEGSDDNDSERNSGLMDDMEEAMVQDAEMAMAECQNDSGEMQDPDPDHEDANRTISPSTSNNIPLMRVVQSVKHTKRKSSTVMKEGWMVHYTSKDTLRKRHYWRLDSKCITLFQNDTGSRYYKEIPLSEILSLEPVKTSALIPNGANPHCFEITTANVVYYVGENVVNPSSPSPNNSVLTSGVGADVARMWEIAIQHALMPVIPKGSSVGTGTNLHRDISVSISVSNCQIQENVDISTVYQIFPDEVLGSGQFGIVYGGKHRKTGRDVAIKIIDKLRFPTKQESQLRNEVAILQNLHHPGVVNLECMFETPERVFVVMEKLHGDMLEMILSSEKGRLPEHITKFLITQILVALRHLHFKNIVHCDLKPENVLLASADPFPQVKLCDFGFARIIGEKSFRRSVVGTPAYLAPEVLRNKGYNRSLDMWSVGVIIYVSLSGTFPFNEDEDIHDQIQNAAFMYPPNPWKEISHEAIDLINNLLQVKMRKRYSVDKTLSHPWLQDYQTWLDLRELECKIGERYITHESDDLRWEKYAGEQGLQYPTHLINPSASHSDTPETEETEMKALGERVSIL

SEQ ID NO: 10809 - protein, 912 aa, Homo Sapiens; identical to SEQ ID NO: 10808

SEQ ID NO: 10810 - protein, 920 aa, Homo Sapiens
MSAPPVLRPPSPLLPVAAAAAAAAAALVPGSGPGPAPFLAPVAAPVGGISFHLQIGLSREPVLLLQDSSGDYSLAHVREMACSIVDQKFPECGFYGMYDKILLFRHDPTSENILQLVKAASDIQEGDLIEVVLSASATFEDFQIRPHALFVHSYRAPAFCDHCGEMLWGLVRQGLKCEGCGLNYHKRCAFKIPNNCSGVRRRRLSNVSLTGVSTIRTSSAELSTSAPDEPLLSPVSPGFEQKSPSESFIGREKRSNSQSYIGRPIHLDKILMSKVKVPHTFVIHSYTRPTVCQYCKKLLKGLFRQGLQCKDCRFNCHKRCAPKVPNNCLGEVTINGDLLSPGAESDVVMEEGSDDNDSERNSGLMDDMEEAMVQDAEMAMAECQNDSGEMQDPDPDHEDANRTISPSTSNNIPLMRVVQSVKHTKRKSSTVMKEGWMVHYTSKDTLRKRHYWRLDSKCITLFQNDTGSRYYKEIPLSEILSLEPVKTSALIPNGANPHCFEITTANVVYYVGENVVNPSSPSPNNSVLTSGVGADVARMWEIAIQHALMPVIPKGSSVGTGTNLHRDISVSISVSNCQIQENVDISTVYQIFPDEVLGSGQFGIVYGGKHRKTGRDVAIKIIDKLRFPTKQESQLRNEVAILQNLHHPGVVNLECMFETPERVFVVMEKLHGDMLEMILSSEKGRLPEHITKFLITQILVALRHLHFKNIVHCDLKPENVLLASADPFPQVKLCDFGFARIIGEKSFRRSVVGTPAYLAPEVLRNKGYNRSLDMWSVGVIIYVSLSGTFPFNEDEDIHDQIQNAAFMYPPNPWKEISHEAIDLINNLLQVKMRKRYSVDKTLSHPWLQDYQTWLDLRELECKIGERYITHESDDLRWEKYAGEQGLQYPTHLINPSASHSDTPETEETEMKALGERVSIL

SEQ ID NO: 10811 - protein, 157 aa, Homo Sapiens
SSTVMKEGWMVHYTSKDTLRKRHYWRLDSKCITLFQNDTGSRYYKEIPLSEILSLEPVKTSALIPNGANPHCFEITTANVVYYVGENVVNPSSPSPNNSVLTSGVGADVARMWEIAIQHALMPVIPKGSSVGTGTNLHSESASFLTSPKLIMCLPLA

SEQ ID NO: 10812 - protein, 228 aa, Homo Sapiens
MNIKGSPWKAGSLLLLLVSNLLLCQSVAPLPICPGGAARCQVTLRDLFDRAVVLSHYIHNLSSEMFSEFDKRYTHGRGFITKAINSCHTSSLATPEDKEQAQQMNQKDFLSLIVSILRSWNEPLYHLVTEVRGMQEAPEAILSKAVEIEEQTKRLLEGMELIVSQVHPETKENEIYPVWSGLPSLQMADEESRLSAYYNLLHCLRRDSHKIDNYLKLLKCRIIHNNNC

SEQ ID NO: 10813 - protein, 227 aa, Homo Sapiens
MNIKGSPWKGSLLLLLVSNLLLCQSVAPLPICPGGAARCQVTLRDLFDRAVVLSHYIHNLSSEMFSEFDKRYTHGRGFITKAINSCHTSSLATPEDKEQAQQMNQKDFLSLIVSILRSWNEPLYHLVTEVRGMQEAPEAILSKAVEIEEQTKRLLEGMELIVSQVHPETKENEIYPVWSGLPSLQMADEESRLSAYYNLLHCLRRDSHKIDNYLKLLKCRIIHNNNC

SEQ ID NO: 10814 - protein, 196 aa, Homo Sapiens
MNIKGSPWKGSLLLLLVSNLLLSHYIHNLSSEMFSEFDKRYTHGRGFITKAINSCHTSSLATPEDKEQAQQMNQKDFLSLIVSILRSWNEPLYHLVTEVRGMQEAPEAILSKAVEIEEQTKRLLEGMELIVSQVHPETKENEIYPVWSGLPSLQMADEESRLSAYYNLLHCLRRDSHKIDNYLKLLKCRIIHNNNC

SEQ ID NO: 10815 - protein, 87 aa, Homo Sapiens
MKVLRAWLLCLLMLGLALRGAASRTHRHSMEIRTPDINPAWYASRGIRPVGRFGRRRATLGDVPKPGLRPRLTCFPLEGGAMSSQDG

SEQ ID NO: 10816 - protein, 33 aa, Homo Sapiens
MKENVASATVFTLLLFLNTCLLNDPFCWAANRV

SEQ ID NO: 10817 - protein, 34 aa, Homo Sapiens
MKENVASATVFTLLLFLNTCLLNERHSCMNVQTT

SEQ ID NO: 10818 - protein, 34 aa, Homo Sapiens; identical to SEQ ID NO: 10817

SEQ ID NO: 10819 - protein, 34 aa, Homo Sapiens
MKENVASATVFTLLLFLNTCLLNGQLPPGKPEIF

SEQ ID NO: 10820 - protein, 62 aa, Homo Sapiens
MKENVASATVFTLLLFLNTCLLNGQLPPGKPEIFKCRSPNKETFTCWWRPGTDGGLPTNYSL

SEQ ID NO: 10821 - protein, 103 aa, Homo Sapiens
MKENVASATVFTLLLFLNTCLLNGQLPPGKPEIFKCRSPNKETFTCWWRPGTDGGLPTNYSLTYHREGETLMHECPDYITGGPNSCHFGKQYTSMWRTYIMMV

SEQ ID NO: 10822 - protein, 111 aa, Homo Sapiens
MKENVASATVFTLLLFLNTCLLNGQLPPGKPEIFKCRSPNKETFTCWWRPGTDGGLPTNYSLTYHREGETLMHECPDYITGGPNSCHFGKQYTSMWRTYIMMVNATNQMGS

SEQ ID NO: 10823 - protein, 120 aa, Homo Sapiens
MKENVASATVFTLLLFLNTCLLNGQLPPGKPEIFKCRSPNKETFTCWWRPGTDGGLPTNYSLTYHREGETLMHECPDYITGGPNSCHFGKQYTSMWRTYIMMVNATNQMGSSFSDELYVD

SEQ ID NO: 10824 - protein, 376 aa, Homo Sapiens
MKENVASATVFTLLLFLNTCLLNGQLPPGKPEIFKCRSPNKETFTCWWRPGTDGGLPTNYSLTYHREGETLMHECPDYITGGPNSCHFGKQYTSMWRTYIMMVNATNQMGSSFSDELYVDVTYIVQPDPPLELAVEVKQPEDRKPYLWIKWSPPTLIDLKTGWFTLLYEIRLKPEKAAEWEIHFAGQQTEFKILSLHPGQKYLVQVRCKPDHGYWSAWSPATFIQIPSDFTMNDTTVWISVAVLSAVICLIIVWAVALKGYSMVTCIFPPVPGPKIKGFDAHLLEKGKSEELLSALGCQDFPPTSDYEDLLVEYLEVDDSEDQHLMSVHSKEHPSQGDPLMLGASHYKNLKSYRPRKISSQGRLAVFTKATLTTVQ

SEQ ID NO: 10825 - protein, 349 aa, Homo Sapiens
MKENVASATVFTLLLFLNTCLLNGQLPPGKPEIFKCRSPNKETFTCWWRPGTDGGLPTNYSLTYHREGETLMHECPDYITGGPNSCHFGKQYTSMWRTYIMMVNATNQMGSSFSDELYVDVTYIVQPDPPLELAVEVKQPEDRKPYLWIKWSPPTLIDLKTGWFTLLYEIRLKPEKAAEWEIHFAGQQTEFKILSLHPGQKYLVQVRCKPDHGYWSAWSPATFIQIPSDFTMNDTTVWISVAVLSAVICLIIVWAVALKGYSMVTCIFPPVPGPKIKGFDAHLLEKGKSEELLSALGCQDFPPTSDYEDLLVEYLEVDDSEDQHLMSVHSKEHPSQEREQRQAQEARDS

SEQ ID NO: 10826 - protein, 288 aa, Homo Sapiens
MKENVASATVFTLLLFLNTCLLNGQLPPGKPEIFKCRSPNKETFTCWWRPGTDGGLPTNYSLTYHREGETLMHECPDYITGGPNSCHFGKQYTSMWRTYIMMVNATNQMGSSFSDELYVDVTYIVQPDPPLELAVEVKQPEDRKPYLWIKWSPPTLIDLKTGWFTLLYEIRLKPEKAAEWEIHFAGQQTEFKILSLHPGQKYLVQVRCKPDHGYWSAWSPATFIQIPSDFTMNDTTVWISVAVLSAVICLIIVWAVALKGYSMVTCIFPPVPGPKIKGFDAHLLEVTP

SEQ ID NO: 10827 - protein, 622 aa, Homo Sapiens
MKENVASATVFTLLLFLNTCLLNGQLPPGKPEIFKCRSPNKETFTCWWRPGTDGGLPTNYSLTYHREGETLMHECPDYITGGPNSCHFGKQYTSMWRTYIMMVNATNQMGSSFSDELYVDVTYIVQPDPPLELAVEVKQPEDRKPYLWIKWSPPTLIDLKTGWFTLLYEIRLKPEKAAEWEIHFAGQQTEFKILSLHPGQKYLVQVRCKPDHGYWSAWSPATFIQIPSDFTMNDTTVWISVAVLSAVICLIIVWAVALKGYSMVTCIFPPVPGPKIKGFDAHLLEKGKSEELLSALGCQDFPPTSDYEDLLVEYLEVDDSEDQHLMSVHSKEHPSQGMKPTYLDPDTDSGRGSCDSPSLLSEKCEEPQANPSTFYDPEVIEKPENPETTHTWDPQCISMEGKIPYFHAGGSKCSTWPLPQPSQHNPRSSYHNITDVCELAVGPAGAPATLLNEAGKDALKSSQTIKSREEGKATQQREVESFHSETDQDTPWLLPQEKTPFGSAKPLDYVEIHKVNKDGALSLLPKQRENSGKPKKPGTPENNKEYAKVSGVMDNNILVLVPDPHAKNVACFEESAKEAPPSLEQNQAEKALANFTATSSKCRLQLGGLDYLDPACFTHSFH

SEQ ID NO: 10828 - protein, 288 aa, Homo Sapiens; identical to SEQ ID NO: 10826

SEQ ID NO: 10829 - protein, 376 aa, Homo Sapiens; identical to SEQ ID NO: 10824

SEQ ID NO: 10830 - protein, 349 aa, Homo Sapiens; identical to SEQ ID NO: 10825

SEQ ID NO: 10831 - protein, 268 aa, Homo Sapiens
MKENVASATVFTLLLFLNTCLLNGQLPPGKPEIFKCRSPNKETFTCWWRPGTDGGLPTNYSLTYHREGETLMHECPDYITGGPNSCHFGKQYTSMWRTYIMMVNATNQMGSSFSDELYVDVTYIVQPDPPLELAVEVKQPEDRKPYLWIKWSPPTLIDLKTGWFTLLYEIRLKPEKAAEWEIHFAGQQTEFKILSLHPGQKYLVQVRCKPDHGYWSAWSPATFIQIPSGDPLMLGASHYKNLKSYRPRKISSQGRLAVFTKATLTTVQ

SEQ ID NO: 10832 - protein, 268 aa, Homo Sapiens; identical to SEQ ID NO: 10831

SEQ ID NO: 10833 - protein, 521 aa, Homo Sapiens
MKENVASATVFTLLLFLNTCLLNVQPDPPLELAVEVKQPEDRKPYLWIKWSPPTLIDLKTGWFTLLYEIRLKPEKAAEWEIHFAGQQTEFKILSLHPGQKYLVQVRCKPDHGYWSAWSPATFIQIPSDFTMNDTTVWISVAVLSAVICLIIVWAVALKGYSMVTCIFPPVPGPKIKGFDAHLLEKGKSEELLSALGCQDFPPTSDYEDLLVEYLEVDDSEDQHLMSVHSKEHPSQGMKPTYLDPDTDSGRGSCDSPSLLSEKCEEPQANPSTFYDPEVIEKPENPETTHTWDPQCISMEGKIPYFHAGGSKCSTWPLPQPSQHNPRSSYHNITDVCELAVGPAGAPATLLNEAGKDALKSSQTIKSREEGKATQQREVESFHSETDQDTPWLLPQEKTPFGSAKPLDYVEIHKVNKDGALSLLPKQRENSGKPKKPGTPENNKEYAKVSGVMDNNILVLVPDPHAKNVACFEESAKEAPPSLEQNQAEKALANFTATSSKCRLQLGGLDYLDPACFTHSFH

SEQ ID NO: 10834 - protein, 521 aa, Homo Sapiens; identical to SEQ ID NO: 10833

SEQ ID NO: 10835 - protein, 217 aa, Homo Sapiens
MANLGCWMLVLFVATWSDLGLCKKRPKPGGWNTGGSRYPGQGSPGGNRYPPQGGGGWGQPHGGGWGQPHGGGWGQPHGGGWGQPHGGGWGQGGGTHSQWNKPSKPKTNMKHMAGAAAAGAVVGGLGGYMLGSAMSRPIIHFGSDYEDRYYRENMHRYPNQVYYRPMDEYSNQNNFVHDCVNITIKQHTVTTTTKGENFTETDVKMMERVVEQMCITQ

SEQ ID NO: 10836 - protein, 249 aa, Homo Sapiens
MANLGCWMLVLFVATWSDLGLCKKRPKPGGWNTGGSRYPGQGSPGGNRYPPQGGGGWGQPHGGGWGQPHGGGWGQPHGGGWGQPHGGGWGQGGGTHSQWNKPSKPKTNMKHMAGAAAAGAVVGGLGGYMLGSAMSRPIIHFGSDYEDRYYRENMHRYPNQVYYRPMDEYSNQNNFVHDCVNITIKQHTVTTTTKGENFTETDVKMMERVVEQMCITQYERESQAYYQRGSSMVLFSSPPVILLISFLIF

SEQ ID NO: 10837 - protein, 253 aa, Homo Sapiens
MANLGCWMLVLFVATWSDLGLCKKRPKPGGWNTGGSRYPGQGSPGGNRYPPQGGGGWGQPHGGGWGQPHGGGWGQPHGGGWGQPHGGGWGQGGGTHSQWNKPSKPKTNMKHMAGAAAAGAVVGGLGGYMLGSAMSRPIIHFGSDYEDRYYRENMHRYPNQVYYRPMDEYSNQNNFVHDCVNITIKQHTVTTTTKGENFTETDVKMMERVVEQMCITQYERESQAYYQRGSSMVLFSSPPVILLISFLIFLIVG

SEQ ID NO: 10838 - protein, 253 aa, Homo Sapiens; identical to SEQ ID NO: 10837

SEQ ID NO: 10839 - protein, 94 aa, Homo Sapiens
MQHSLVFFFAVILHLSHLLHLDASIHPFRLPFSSKPFLLIPMSNTTLPHTAWPLSFLHQTVSTLKAVAVTHSLWHLQIPVDCQACNRKSKKIYC

SEQ ID NO: 10840 - protein, 116 aa, Homo Sapiens
MWQLTSLLLFVATWGISGTPAPLDSVFSSSERAHQVLRIRKRANSFLEELRHSSLERECIEEICDFEEAKEIFQNVDDTLAFWSKHVDGDQCLVLPLEHPCASLCCGHGTCIDGIG

SEQ ID NO: 10841 - protein, 126 aa, Homo Sapiens
MWQLTSLLLFVATWGISGTPAPLDSVFSSSERAHQVLRIRKRANSFLEELRHSSLERECIEEICDFEEAKEIFQNVDDTLAFWSKHVDGDQCLVLPLEHPCASLCCGHGTCIDGIGSFSCDCRSGW

SEQ ID NO: 10842 - protein, 175 aa, Homo Sapiens
MWQLTSLLLFVATWGISGTPAPLDSVFSSSERAHQVLRIRKRANSFLEELRHSSLERECIEEICDFEEAKEIFQNVDDTLAFWSKHVDGDQCLVLPLEHPCASLCCGHGTCIDGIGSFSCDCRSGWEGRFCQREEVGWRRCSCAPGYKLGDDLLQCHPAVKFPCGRPWKRMEKKR

SEQ ID NO: 10843 - protein, 461 aa, Homo Sapiens
MWQLTSLLLFVATWGISGTPAPLDSVFSSSERAHQVLRIRKRANSFLEELRHSSLERECIEEICDFEEAKEIFQNVDDTLAFWSKHVDGDQCLVLPLEHPCASLCCGHGTCIDGIGSFSCDCRSGWEGRFCQREVSFLNCSLDNGGCTHYCLEEVGWRRCSCAPGYKLGDDLLQCHPAVKFPCGRPWKRMEKKRSHLKRDTEDQEDQVDPRLIDGKMTRRGDSPWQVVLLDSKKKLACGAVLIHPSWVLTAAHCMDESKKLLVRLGEYDLRRWEKWELDLDIKEVFVHPNYSKSTTDNDIALLHLAQPATLSQTIVPICLPDSGLAERELNQAGQETLVTGWGYHSSREKEAKRNRTFVLNFIKIPVVPHNECSEVMSNMVSENMLCAGILGDRQDACEGDSGGPMVASFHGTWFLVGLVSWGEGCGLLHNYGVYTKVSRYLDWIHGHIRDKEAPQKSWAP

SEQ ID NO: 10844 - protein, 495 aa, Homo Sapiens
MWQLTSLLLFVATWGISGTPAPLDSVFSSSERAHQVLRIRKRANSFLEELRHSSLERECIEEICDFEEAKEIFQNVDDTLAFWSKHVDGDQCLVLPLEHPCASLCCGHGTCIDGIGSFSCDCRSGWEGRFCQRGEGERWMLAGGGAGLGPGWGRGTSTSCPRPPLPAEVSFLNCSLDNGGCTHYCLEEVGWRRCSCAPGYKLGDDLLQCHPAVKFPCGRPWKRMEKKRSHLKRDTEDQEDQVDPRLIDGKMTRRGDSPWQVVLLDSKKKLACGAVLIHPSWVLTAAHCMDESKKLLVRLGEYDLRRWEKWELDLDIKEVFVHPNYSKSTTDNDIALLHLAQPATLSQTIVPICLPDSGLAERELNQAGQETLVTGWGYHSSREKEAKRNRTFVLNFIKIPVVPHNECSEVMSNMVSENMLCAGILGDRQDACEGDSGGPMVASFHGTWFLVGLVSWGEGCGLLHNYGVYTKVSRYLDWIHGHIRDKEAPQKSWAP

SEQ ID NO: 10845 - protein, 52 aa, Homo Sapiens
MWQLTSLLLFVATWGISGTPAPLGAADPQTCQLLPGGAPSQQPGAGVHRGDL

SEQ ID NO: 10846 - protein, 52 aa, Homo Sapiens; identical to SEQ ID NO: 10845

SEQ ID NO: 10847 - protein, 236 aa, Homo Sapiens
  misc_feature (1)..(1): Xaa can be any naturally occurring amino acid
XCSLDNGGCTHYCLEEVGWRRCSCAPGYKLGDDLLQCHPAGEYDLRRWEKWELDLDIKEVFVHPNYSKSTTDNDIALLHLAQPATLSQTIVPICLPDSGLAERELNQAGQETLVTGWGYHSSREKEAKRNRTFVLNFIKIPVVPHNECSEVMSNMVSENMLCAGILGDRQDACEGDSGGPMVASFHGTWFLVGLVSWGEGCGLLHNYGVYTKVSRYLDWIHGHIRDKEAPQKSWAP

SEQ ID NO: 10848 - protein, 105 aa, Homo Sapiens
MRGATRVSIMLLLVTVSDCAVITGACERDVQCGAGTCCAISLWLRGLRMCTPLGREGEECHPGSHKVPFFRKRKHHTCPCLPNLLCSRFPDGRYRCSMDLKNINF

SEQ ID NO: 10849 - protein, 129 aa, Homo Sapiens
MRSLCCAPLLLLLLLPPLLLTPRAGDAAVITGACDKDSQCGGGMCCAVSIWVKSIRICTPMGKLGDSCHPLTRKNNFGNGRQERRKRKRSKRKKEVPFFGRRMHHTCPCLPGLACLRTSFNRFICLAQK

SEQ ID NO: 10850 - protein, 108 aa, Homo Sapiens
MRSLCCAPLLLLLLLPPLLLTPRAGDAAVITGACDKDSQCGGGMCCAVSIWVKSIRICTPMGKLGDSCHPLTRKVPFFGRRMHHTCPCLPGLACLRTSFNRFICLAQK

SEQ ID NO: 10851 - protein, 14 aa, Homo Sapiens
MALVLGSLLLLGLC

SEQ ID NO: 10852 - protein, 40 aa, Homo Sapiens
MALVLGSLLLLGLCGNSFSGGQPSSTDAPKAWNYELPATN

SEQ ID NO: 10853 - protein, 58 aa, Homo Sapiens
MALVLGSLLLLGLCGNSFSGGQPSSTDAPKAWNYELPATNYETQDSHKAGPIGILFEL

SEQ ID NO: 10854 - protein, 856 aa, Homo Sapiens
MALVLGSLLLLGLCGNSFSGGQPSSTDAPKAWNYELPATNYETQDSHKAGPIGILFELVHIFLYVVQPRDFPEDTLRKFLQKAYESKIDYDKIVYYEAGIILCCVLGLLFIILMPLVGYFFCMCRCCNKCGGEMHQRQKENGPFLRKCFAISLLVICIIISIGIFYGFVANHQVRTRIKRSRKLADSNFKDLRTLLNETPEQIKYILAQYNTTKDKAFTDLNSINSVLGGGILDRLRPNIIPVLDEIKSMATAIKETKEALENMNSTLKSLHQQSTQLSSSLTSVKTSLRSSLNDPLCLVHPSSETCNSIRLSLSQLNSNPELRQLPPVDAELDNVNNVLRTDLDGLVQQGYQSLNDIPDRVQRQTTTVVAGIKRVLNSIGSDIDNVTQRLPIQDILSAFSVYVNNTESYIHRNLPTLEEYDSYWWLGGLVICSLLTLIVIFYYLGLLCGVCGYDRHATPTTRGCVSNTGGVFLMVGVGLSFLFCWILMIIVVLTFVFGANVEKLICEPYTSKELFRVLDTPYLLNEDWEYYLSGKLFNKSKMKLTFEQVYSDCKKNRGTYGTLHLQNSFNISEHLNINEHTGSISSELESLKVNLNIFLLGAAGRKNLQDFAACGIDRMNYDSYLAQTGKSPAGVNLLSFAYDLEAKANSLPPGNLRNSLKRDAQTIKTIHQQRVLPIEQSLSTLYQSVKILQRTGNGLLERVTRILASLDFAQNFITNNTSSVIIEETKKYGRTIIGYFEHYLQWIEFSISEKVASCKPVATALDTAVDVFLCSYIIDPLNLFWFGIGKATVFLLPALIFAVKLAKYYRRMDSEDVYDDVETIPMKNMENGNNGYHKDHVYGIHNPVMTSPSQH

SEQ ID NO: 10855 - protein, 856 aa, Homo Sapiens; identical to SEQ ID NO: 10854

SEQ ID NO: 10856 - protein, 865 aa, Homo Sapiens
MALVLGSLLLLGLCGNSFSGGQPSSTDAPKAWNYELPATNYETQDSHKAGPIGILFELVHIFLYVVQPRDFPEDTLRKFLQKAYESKIDYDKPETVILGLKIVYYEAGIILCCVLGLLFIILMPLVGYFFCMCRCCNKCGGEMHQRQKENGPFLRKCFAISLLVICIIISIGIFYGFVANHQVRTRIKRSRKLADSNFKDLRTLLNETPEQIKYILAQYNTTKDKAFTDLNSINSVLGGGILDRLRPNIIPVLDEIKSMATAIKETKEALENMNSTLKSLHQQSTQLSSSLTSVKTSLRSSLNDPLCLVHPSSETCNSIRLSLSQLNSNPELRQLPPVDAELDNVNNVLRTDLDGLVQQGYQSLNDIPDRVQRQTTTVVAGIKRVLNSIGSDIDNVTQRLPIQDILSAFSVYVNNTESYIHRNLPTLEEYDSYWWLGGLVICSLLTLIVIFYYLGLLCGVCGYDRHATPTTRGCVSNTGGVFLMVGVGLSFLFCWILMIIVVLTFVFGANVEKLICEPYTSKELFRVLDTPYLLNEDWEYYLSGKLFNKSKMKLTFEQVYSDCKKNRGTYGTLHLQNSFNISEHLNINEHTGSISSELESLKVNLNIFLLGAAGRKNLQDFAACGIDRMNYDSYLAQTGKSPAGVNLLSFAYDLEAKANSLPPGNLRNSLKRDAQTIKTIHQQRVLPIEQSLSTLYQSVKILQRTGNGLLERVTRILASLDFAQNFITNNTSSVIIEETKKYGRTIIGYFEHYLQWIEFSISEKVASCKPVATALDTAVDVFLCSYIIDPLNLFWFGIGKATVFLLPALIFAVKLAKYYRRMDSEDVYDDVETIPMKNMENGNNGYHKDHVYGIHNPVMTSPSQH

SEQ ID NO: 10857 - protein, 865 aa, Homo Sapiens; identical to SEQ ID NO: 10856

SEQ ID NO: 10858 - protein, 834 aa, Homo Sapiens
MALVLGSLLLLGLCGNSFSGGQPSSTDAPKAWNYELPATNYETQDSHKAGPIGILFELVHIFLYVVQPRDFPEDTLRKFLQKAYESKIDYDKPETVILGLKIVYYEAGIILCCVLGLLFIILMPLVGYFFCMCRCCNKCGGEMHQRQKENGPFLRKCFAISLLVICIIISIGIFYGFVANHQVRTRIKRSRKLADSNFKDLRTLLNETPEQIKYILAQYNTTKDKAFTDLNSINSVLGGGILDRLRPNIIPVLDEIKSMATAIKETKEALENMNSTLKSLHQQSTQLSSSLTSVKTSLRSSLNDPLCLVHPSSETCNSIRLSLSQLNSNPELRQLPPVDAELDNVNNVLRTDLDGLVQQGYQSLNDIPDRVQRQTTTVVAGIKRVLNSIGSDIDNVTQRLPIQDILSAFSVYVNNTESYIHRNLPTLEEYDSYWWLGGLVICSLLTLIVIFYYLGLLCGVCGYDRHATPTTRGCVSNTGGVFLMVGVGLSFLFCWILMIIVVLTFVFGANVEKLICEPYTSKELFRVLDTPYLLNEDWEYYLSGKLFNKSKMKLTFEQVYSDCKKNRGTYGTLHLQNSFNISEHLNINEHTGSISSELESLKVNLNIFLLGAAGRKNLQDFAACGIDRMNYDSYLAQTGKSPAGVNLLSFAYDLEAKANSLPPGNLRNSLKRDAQTIKTIHQQRVLPIEQSLSTLYQSVKILQRTGNGLLERVTRILASLDFAQNFITNNTSSVIIEETKKYGRTIIGYFEHYLQWIEFSISEKVASCKPVATALDTAVDVFLCSYIIDPLNLFWFGIGKATVFLLPALIFAVKLAKYYRRMDSEDVYDDPSQH

SEQ ID NO: 10859 - protein, 842 aa, Homo Sapiens
MALVLGSLLLLGLCGNSFSGGQPSSTDAPKAWNYELPATNYETQDSHKAGPIGILFELVHIFLYVVQPRDFPEDTLRKFLQKAYESKIDYDKPETVILGLKIVYYEAGIILCCVLGLLFIILMPLVGYFFCMCRCCNKCGGEMHQRQKENGPFLRKCFAISLLVICIIISIGIFYGFVANHQVRTRIKRSRKLADSNFKDLRTLLNETPEQIKYILAQYNTTKDKAFTDLNSINSVLGGGILDRLRPNIIPVLDEIKSMATAIKETKEALENMNSTLKSLHQQSTQLSSSLTSVKTSLRSSLNDPLCLVHPSSETCNSIRLSLSQLNSNPELRQLPPVDAELDNVNNVLRTDLDGLVQQGYQSLNDIPDRVQRQTTTVVAGIKRVLNSIGSDIDNVTQRLPIQDILSAFSVYVNNTESYIHRNLPTLEEYDSYWWLGGLVICSLLTLIVIFYYLGLLCGVCGYDRHATPTTRGCVSNTGGVFLMVGVGLSFLFCWILMIIVVLTFVFGANVEKLICEPYTSKELFRVLDTPYLLNEDWEYYLSGKLFNKSKMKLTFEQVYSDCKKNRGTYGTLHLQNSFNISEHLNINEHTGSISSELESLKVNLNIFLLGAAGRKNLQDFAACGIDRMNYDSYLAQTGKSPAGVNLLSFAYDLEAKANSLPPGNLRNSLKRDAQTIKTIHQQRVLPIEQSLSTLYQSVKILQRTGNGLLERVTRILASLDFAQNFITNNTSSVIIEETKKYGRTIIGYFEHYLQWIEFSISEKVASCKPVATALDTAVDVFLCSYIIDPLNLFWFGIGKATVFLLPALIFAVKLAKYYRRMDSEDVYDDVETIPMKNPSQH

SEQ ID NO: 10860 - protein, 93 aa, Homo Sapiens
  misc_feature (1)..(1): Xaa can be any naturally occurring amino acid
XEHYLQWIEFSISEKVASCKPVATALDTAVDVFLCSYIIDPLNLFWFGIGKATVFLLPALIFAVKLAKYYRRMDSEDVYDDVETIPMKNPSQH

SEQ ID NO: 10861 - protein, 54 aa, Homo Sapiens
  misc_feature (1)..(1): Xaa can be any naturally occurring amino acid
XQDSHKAGPIGILFELVHIFLYVVQPRDFPEDENTKAQIGEACSFKTLQPNESW

SEQ ID NO: 10862 - protein, 65 aa, Homo Sapiens
  misc_feature (1)..(1): Xaa can be any naturally occurring amino acid
XVDVFLCSYIIDPLNLFWFGIGKATVFLLPALIFAVKLAKYYRRMDSEDVYDDVETIPMKNPSQH

SEQ ID NO: 10863 - protein, 231 aa, Homo Sapiens
MRVLGGRCGALLACLLLVLPVSEANFCLYFRNDFIYNRACISVLVGLSGCNFFYSICFLSKQQASQVLVRKRRANSLLEETKQGNLERECIEELCNKEEAREVFENDPETDYFYPKYLVCLRSFQTGLFTAARQSTNAYPDLRSCVNAIPDQCSPLPCNEDGYMSCKDGKASFTCTCKPGWQGEKCEFDINECKDPSNINGGCSQICDNTPGSYHCSCKNGFVMLSNKKDC

SEQ ID NO: 10864 - protein, 676 aa, Homo Sapiens
MRVLGGRCGALLACLLLVLPVSEANFLSKQQASQVLVRKRRANSLLEETKQGNLERECIEELCNKEEAREVFENDPETDYFYPKYLVCLRSFQTGLFTAARQSTNAYPDLRSCVNAIPDQCSPLPCNEDGYMSCKDGKASFTCTCKPGWQGEKCEFDINECKDPSNINGGCSQICDNTPGSYHCSCKNGFVMLSNKKDCKDVDECSLKPSICGTAVCKNIPGDFECECPEGYRYNLKSKSCEDIDECSENMCAQLCVNYPGGYTCYCDGKKGFKLAQDQKSCEVVSVCLPLNLDTKYELLYLAEQFAGVVLYLKFRLPEISRFSAEFDFRTYDSEGVILYAESIDHSAWLLIALRGGKIEVQLKNEHTSKITTGGDVINNGLWNMVSVEELEHSISIKIAKEAVMDINKPGPLFKPENGLLETKVYFAGFPRKVESELIKPINPRLDGCIRSWNLMKQGASGIKEIIQEKQNKHCLVTVEKGSYYPGSGIAQFHIDYNNVSSAEGWHVNVTLNIRPSTGTGVMLALVSGNNTVPFAVSLVDSTSEKSQDILLSVENTVIYRIQALSLCSDQQSHLEFRVNRNNLELSTPLKIETISHEDLQRQLAVLDKAMKAKVATYLGGLPDVPFSATPVNAFYNGCMEVNINGVQLDLDEAISKHNDIRAHSCPSVWKKTKNS

SEQ ID NO: 10865 - protein, 56 aa, Homo Sapiens
MSCKDGKASFTCTCKPGWQGEKCEFDINECKDPSNINGGCSQICDNTPGSYHCSCK

SEQ ID NO: 10866 - protein, 545 aa, Homo Sapiens
MSCKDGKASFTCTCKPGWQGEKCEFDINECKDPSNINGGCSQICDNTPGSYHCSCKNGFVMLSNKKDCKDVDECSLKPSICGTAVCKNIPGDFECECPEGYRYNLKSKSCEDIDECSENMCAQLCVNYPGGYTCYCDGKKGFKLAQDQKSCEVVSVCLPLNLDTKYELLYLAEQFAGVVLYLKFRLPEISRFSAEFDFRTYDSEGVILYAESIDHSAWLLIALRGGKIEVQLKNEHTSKITTGGDVINNGLWNMVSVEELEHSISIKIAKEAVMDINKPGPLFKPENGLLETKVYFAGFPRKVESELIKPINPRLDGCIRSWNLMKQGASGIKEIIQEKQNKHCLVTVEKGSYYPGSGIAQFHIDYNNVSSAEGWHVNVTLNIRPSTGTGVMLALVSGNNTVPFAVSLVDSTSEKSQDILLSVENTVIYRIQALSLCSDQQSHLEFRVNRNNLELSTPLKIETISHEDLQRQLAVLDKAMKAKVATYLGGLPDVPFSATPVNAFYNGCMEVNINGVQLDLDEAISKHNDIRAHSCPSVWKKTKNS

SEQ ID NO: 10867 - protein, 422 aa, Homo Sapiens
MAGCVPLLQGLVLVLALHRVEPSATSLKERHGLHSDSACTGVQESLFLPASKANDVLVRWKRAGSYLLEELFEGNLEKECYEEICVYEEAREVFENEVVTDEFWRRYKGGSPCISQPCLHNGSCQDSIWGYTCTCSPGYEGSNCELAKNECHPERTDGCQHFCLPGQESYTCSCAQGYRLGEDHKQCVPHDQCACGVLTSEKRAPDLQDLPWQVKLTNSEGKDFCGGVIIRENFVLTTAKCSLLHRNITVKTYFNRTSQDPLMIKITHVHVHMRYDADAGENDLSLLELEWPIQCPGAGLPVCTPEKDFAEHLLIPRTRGLLSGWARNGTDLGNSLTTRPVTLVEGEECGQVLNVTVTTRTYCERSSVAAMHWMDGSVVTREHRGSWFLTGVLGSQPVGGQAHMVLVTKVSRYSLWFKQIMN

SEQ ID NO: 10868 - protein, 400 aa, Homo Sapiens
MAGCVPLLQGLVLVLALHRVEPSVFLPASKANDVLVRWKRAGSYLLEELFEGNLEKECYEEICVYEEAREVFENEVVTDEFWRRYKGGSPCISQPCLHNGSCQDSIWGYTCTCSPGYEGSNCELAKNECHPERTDGCQHFCLPGQESYTCSCAQGYRLGEDHKQCVPHDQCACGVLTSEKRAPDLQDLPWQVKLTNSEGKDFCGGVIIRENFVLTTAKCSLLHRNITVKTYFNRTSQDPLMIKITHVHVHMRYDADAGENDLSLLELEWPIQCPGAGLPVCTPEKDFAEHLLIPRTRGLLSGWARNGTDLGNSLTTRPVTLVEGEECGQVLNVTVTTRTYCERSSVAAMHWMDGSVVTREHRGSWFLTGVLGSQPVGGQAHMVLVTKVSRYSLWFKQIMN

SEQ ID NO: 10869 - protein, 26 aa, Homo Sapiens
MKLLLWACIVCVAFARKNAGLGFLWL

SEQ ID NO: 10870 - protein, 219 aa, Homo Sapiens
MKLLLWACIVCVAFARKRRFPFIGEDDNDDGHPLHPSLNIPYGIRNLPPPLYYRPVNTVPSYPGNTYTDTGLPSYPWILTSPGFPYVYHIRGFPLATQLNVPPLPPRGFPFVPPSRFFSAAAAPAAPPIAAEPAAAAPLTATPVAAEPAAGAPVAAEPAAEAPVGAEPAAEAPVAAEPAAEAPVGVEPAAEEPSPAEPATAKPAAPEPHPSPSLEQANQ

SEQ ID NO: 10871 - protein, 219 aa, Homo Sapiens; identical to SEQ ID NO: 10870

SEQ ID NO: 10872 - protein, 61 aa, Homo Sapiens
  misc_feature (1)..(1): Xaa can be any naturally occurring amino acid
XAEAPVGAEPAAEAPVAAEPAAEAPVGVEPAAEEPSPAEPATAKPAAPEPHPSPSLEQANQ

SEQ ID NO: 10873 - protein, 65 aa, Homo Sapiens
MLLVLLSVVLLALSSAQSTDNDVNYEDFTFTIPACRKHHHSSRGTDQQDIPRSNHSGNLEFSGRK

SEQ ID NO: 10874 - protein, 78 aa, Homo Sapiens
MLLVLLSVVLLALSSAQSTDNDVNYEDFTFTIPATTTPTRTPSTLSTPISFCQPAGSIIILPEGQTSKTSPGATTLVI

SEQ ID NO: 10875 - protein, 134 aa, Homo Sapiens
MLLVLLSVVLLALSSAQSTDNDVNYEDFTFTIPDVEDSSQRPDQGPQRPPPEGLLPRPPGDSGNQDDGPQQRPPKPGGHHRHPPPPPFQNQQRPPRRGHRQLSLPRFPSVSLQEASSFFQRDRPARHPQEQPLW

SEQ ID NO: 10876 - protein, 98 aa, Homo Sapiens
MRGHPSLLLLYMALTTCLDTSPSEETDQEVFLGPPEAQSFLSSHTRIPRANHWDLELLTPGNLERECLEERCSWEEAREYFEDNTLTERFWESYIYNG

SEQ ID NO: 10877 - protein, 202 aa, Homo Sapiens
MRGHPSLLLLYMALTTCLDTSPSEETDQEVFLGPPEAQSFLSSHTRIPRANHWDLELLTPGNLERECLEERCSWEEAREYFEDNTLTERFWESYIYNGKGGRGRVDVASLAVGLTGGILLIVLAGLGAFWYLRWRQHRGQQPCPQEAGLISPLSPLNPLGPPTPLPPPPPPPPGLPTYEQALAASGVHDAPPPPYTSLRRPH

SEQ ID NO: 10878 - protein, 96 aa, Homo Sapiens
MRGHPSLLLLYMALTTCLDTSPSEETDQVLPLPGVQDPAPSSFRPRNLDSQPLLLPPGPHCFPSPYDSSPRDPPFFCPSCLWVQKSSWVPQRPRAS

SEQ ID NO: 10879 - protein, 981 aa, Homo Sapiens
MASSPWGCVCGLLLLLLPLLGTGPALGRGFPRPLENSEIPMIPGAHPKGSVGSEPQAFDVFPENPRADSHRNSDVRHAPAEEMPEKPVASPLGPALYGPKAAQGAQRERLPVTDDLQMAQGPSSHGWTGPLDSQELLQQEAVAPHPVGHPHLTFIPTTPRRQLRVATVPPSLQHEGQEGQWPPRDEGLKAKTKSRVPPTSPSDHQGPPHTLVSHSGTVKRPVLEGQGGFEEHLQEAAQGPHFTQQDPAAPDVGSVPPVEVVYSQEPGAQPDLALARSLPPAEELPVETPKRAGAEVSWEVSSPGPPPKQADLPDAKDSPGPQPTDPPASEAPDRPSKPERAAMNGADPISPQRVRGAVEAPGTPKSLIPGPSDPGPAVNRTESPMGALQPDEAEEWPGRPQSHPPAPPVQAPSTSRRGLIRVTTQRALGQPPPPEPTASSMASAPASSPPANATAPPLRWGPLRRVLSFSWELHVYGVGVLFLLPALLALAALAAAPAGPRLALVAAVLVLVASALRSAYMLTDPYGSQARLGVRGGLVLYNLPFPLLLTALAALTLLGLGAGLPPPLQNPLLLGAVALVHGVGLLATDLLSTWSVLNLLTQGLSCAWGAAVALGTLCLCRRRLLDGPRGWDASPGPRLLAVAGALGLLASGLQLAAALWLYPGPGRVGRFSWAWWGVHFWLRLLELTWALALALAAVAAARPRPPTEHACWAKLMRLACPAPSGKSEVPERPNNCYAGPSNVGAGSLDISKSLIRNPAESGQLATPSSGAWGSAASLGRGPQGGPGLSRNGVGPAPSLSELDLRPPSPINLSRSIDAALFREHLVRDSVFQRCGLRGLASPPPGGALRPRRGSHPKAELDDAGSSLLRGRCRSLSDVRVRGPVPQHVVEAPDGAAAAASGSSLDSFSRGSLKISWNPWRHGLSSVDSLPLDELPSTVQLLPAPTPAPDSTAARQGDGQGEVQPRGKPGESRSASSDTIEL

SEQ ID NO: 10880 - protein, 981 aa, Homo Sapiens; identical to SEQ ID NO: 10879

SEQ ID NO: 10881 - protein, 421 aa, Homo Sapiens
MASSPWGCVCGLLLLLLPLLGTGPALGRGFPRPLENSEIPMIPGAHPKGSVGSEPQAFDVFPENPRADSHRNSDVRHAPAEEMPEKPVASPLGPALYGPKAAQGAQRERLPVTDDLQMAQGPSSHGWTGPLDSQELLQQEAVAPHPVGHPHLTFIPTTPRRQLRVATVPPSLQHEGQEGQWPPRDEGLKAKTKSRVPPTSPSDHQGPPHTLVSHSGTVKRPVLEGQGGFEEHLQEAAQGPHFTQQDPAAPDVGSVPPVEVVYSQEPGAQPDLALARSLPPAEELPVETPKRAGAEVSWEVSSPGPPPKQADLPDAKDSPGPQPTDPPASEAPDRPSKPERAAMNGADPISPQRVRGAVEAPGTPKSLIPGPSDPGPAVNRTESPMGALQPGESMAGVWGEGVLCLVTENLCWGCMGAEGGE

SEQ ID NO: 10882 - protein, 205 aa, Homo Sapiens
MARHGCLGLGLFCCVLFAATVGPQPTPSIPGAPATTLTPVPQSEASMLSLNLGLNFKFHLRGPAAVWGSPVTETQPLSLGPGQEPGEEVASGLRTDPLWELLVGSSGNSLTEWGSTEGGSKPRASSLLPESTSRRSGPSDGPTAPYQPRRSTVTWDTALMVTALPSSAPRPHQSELELKFDMALRAGAAPTLGHRTLPLLPSLRA

SEQ ID NO: 10883 - protein, 208 aa, Homo Sapiens
MARHGCLGLGLFCCVLFAATVGPQPTPSIPGAPATTLTPVPQSEASMLSLNLGLNFKFHLRGPAAVWGSPVTETQPLSLGPGQEPGEEVASGLRTDPLWELLVGSSGNSLTEWGSTEGGSKPRASSLLPESTSRRSGPSDGPTAPYQPRRSTVTWDTALMVTALPSSAPRPHQSELELKFDMALRAGAAPTLGHRTLPLLPSLRASLA

SEQ ID NO: 10884 - protein, 899 aa, Homo Sapiens
MARHGCLGLGLFCCVLFAATVGPQPTPSIPGAPATTLTPVPQSEASMLSLNLGLNFKFHLRGPAAVWGSPVTETQPLSLGPGQEPGEEVASGLRTDPLWELLVGSSGNSLTEWGSTEGGSKPRASSLLPESTSRRSGPSDGPTAPYQPRRSTVTWDTALMVTALPSSAPRPHQSELELKFDMALRAGAAPTLGHRTLPLLPSLRASLAEIAGRLGPFGFFGTTLSPLRNFSGLSPPGETTSTSSASGVSGSLGFLGTTLSLPPYSLERKLSSPSPLDPAASLSFASIATTSLDPTVPISGPDDLSPPASLGNPSGQPECGPGSCSVGELPEREGQPPEAPRPLFFLTLEADWAEARARWGLAWEAHVYGVGALFGLVALLALLALALLPWRCPPGAPCLALLDLLLLSAGTTRAFPLFYDAYGHRDRLPALAWLLLQDLPLPCLAAGLGLACLLLARPRPPRCPTGLAALLLLGLGLAAAAALGSAAHRPLRPLRLASRGLHAFLAAFLSGLLLALSCWGGRRRRAGAPLGGSGFKGATPLPQGRSPFAPRESWRRAARTAPVAGTFGLLSGALQGYEVLHALGYGGQSGLEGPWPWWAFQLGLRLGEVGVALPLALLGLYPALCSPRVPPRCWAKLFRLSPGHAAPLLPGGWVTGPPDKEPLGSAIARGDAELLQLCALAGPGPDLLLQGGGCRGFEGAAANPAPSPASSPCSDYTVDFRPPSPINLRRSIEEALCSEALLAPGLFQGPAFEDALPGLGLYRTASLGTGGRASERSGEASGPAAPPELPSPGAWPAGSSVSSGSFCGLSRDSSSMLLCSSPDRPPRCPLVCVLSPPRPSGSSPSLPASGSYQALSPPSRDSPEPASELQAEEALLQEQFLDACRQIDELSVGSDTIDL

SEQ ID NO: 10885 - protein, 899 aa, Homo Sapiens; identical to SEQ ID NO: 10884

SEQ ID NO: 10886 - protein, 480 aa, Homo Sapiens
MARHGCLGLGLFCCVLFAATVGPQPTPSIPGAPATTLTPVPQSEASMLSLNLGLNFKFHLRGPAAVWGSPVTETQPLSLGPGQEPGEEVASGLRTDPLWELLVGSSGNSLTEWGSTEGGSKPRASSLLPESTSRRSGPSDGPTAPYQPRRSTVTWDTALMVTALPSSAPRPHQSELELKFDMALRAGAAPTLGHRTLPLLPSLRASLAEIAGRLGPFGFFGTTLSPLRNFSGLSPPGETTSTSSASGVSGSLGFLGTTLSLPPYSLERKLSSPSPLDPAASLSFASIATTSLDPTVPISGPDDLSPPASLGNPSGQPECGPGSCSVGELPEREGQPPEAPRPLFFLTLEADWAEARARWGLAWEAHVYGVGALFGLVALLALLALALLPWRCPPGAPCLALLDLLLLSAGTTRAFPLFYDAYGHRDRLPALAWLLLQDLPLPCLAAGLGLACLLLARPRPPRCPTGLAALLLLGLGLAAA

SEQ ID NO: 10887 - protein, 429 aa, Homo Sapiens
MARHGCLGLGLFCCVLFAATVGPQPTPSIPGAPATTLTPVPQSEASMLSLNLGLNFKFHLRGPAAVWGSPVTETQPLSLGPGQEPGEEVASGLRTDPLWELLVGSSGNSLTEWGSTEGGSKPRASSLLPESTSRRSGPSDGPTAPYQPRRSTVTWDTALMVTALPSSAPRPHQSELELKFDMALRAGAAPTLGHRTLPLLPSLRASLAEIAGRLGPFGFFGTTLSPLRNFSGLSPPGETTSTSSASGVSGSLGFLGTTLSLPPYSLERKLSSPSPLDPAASLSFASIATTSLDPTVPISGPDDLSPPASLGNPSGQPECGPGSCSVGELPEREGQPPEAPRPLFFLTLEADWAEARARWGLAWEAHVYGRLHRGLPPALPNQPATQHRGGPLQRGPACAWPLPGPCLRGRSAWARTLPHRLAGDRGQGQ

SEQ ID NO: 10888 - protein, 419 aa, Homo Sapiens
  misc_feature (1)..(1): Xaa can be any naturally occurring amino acid
XSKPRASSLLPESTSRRSGPSDGPTAPYQPRRSTVTWDTALMVTALPSSAPRPHQSELELKFDMALRAGAAPTLGHRTLPLLPSLRASLAEIAGRLGPFGFFGTTLSPLRNFSGLSPPGETTSTSSASGVSGSLGFLGTTLSLPPYSLERKLSSPILACRRAAGPSSSACPRATRLRCCREAGSLGPQTRSPWGAPSLAGTRSCCSCARWQGQAQTSYSRAEVAGASKARRPTRPRPRLPLPAAITPWTSARPPQSTCDAASRRPSAARPCLRLASSRALPSRTLCLGSDSTAPPRWGPGAGPVRDQGRPLAPLRPRSSPPLGLGPQAAASHLARSADSRGTARPCCCVPAPTGPRAALWSASSVPRGPQEAAPASRPQDPTRPCPHPLATPQSLLLSCRPRRPCCRSSSWTPADRSTS

SEQ ID NO: 10889 - protein, 261 aa, Homo Sapiens
MNPLLILTFVAAALAAPFDDDDKIVGGYNCEENSVPYQVSLNSGYHFCGGSLINEQWVVSAGHCYKSAIKSKFSGRGCEYHRIQVRLGEHNIEVLEGNEQFINAAKIIRHPQYDRKTLNNDIMLIKLSSRAVINARVSTISLPTAPPATGTKCLISGWGNTASSGADYPDELQCLDAPVLSQAKCEASYPGKITSNMFCVGFLEGGKDSCQGDSGGPVVCNGQLQGVVSWGDGCAQKNKPGVYTKVYNYVKWIKNTIAANS

SEQ ID NO: 10890 - protein, 247 aa, Homo Sapiens
MNPLLILTFVAAALAAPFDDDDKIVGGYNCEENSVPYQVSLNSGYHFCGGSLINEQWVVSAGHCYKSRIQVRLGEHNIEVLEGNEQFINAAKIIRHPQYDRKTLNNDIMLIKLSSRAVINARVSTISLPTAPPATGTKCLISGWGNTASSGADYPDELQCLDAPVLSQAKCEASYPGKITSNMFCVGFLEGGKDSCQGDSGGPVVCNGQLQGVVSWGDGCAQKNKPGVYTKVYNYVKWIKNTIAANS

SEQ ID NO: 10891 - protein, 237 aa, Homo Sapiens
MNPLLILTFVAAALAAPFDDDDKIVGGYNCEENSVPYQVSLNSGYHFCGGSLINEQWVVSAGHCYKSRIQVRLGEHNINAAKIIRHPQYDRKTLNNDIMLIKLSSRAVINARVSTISLPTAPPATGTKCLISGWGNTASSGADYPDELQCLDAPVLSQAKCEASYPGKITSNMFCVGFLEGGKDSCQGDSGGPVVCNGQLQGVVSWGDGCAQKNKPGVYTKVYNYVKWIKNTIAANS

SEQ ID NO: 10892 - protein, 142 aa, Homo Sapiens
SLINEQWVVSAGHCYKSRIQVRLGEHNIEVLEGNEQFINAAKIIRHPQYDRKTLNNDIMLIKLSSRAVINARVSTISLPTAPPATGTKCLISGWGNTASSGADYPDELQCLDAPVLSQAKCEASYPGKITSNMFCVGFLEGG

SEQ ID NO: 10893 - protein, 875 aa, Homo Sapiens
MTLARFVLALMLGALPEVVGFDSVLNDSLHHSHRHSPPAGPHYPYYLPTQQRPPRTRPPPPLPRFPRPPRALPAQRPHALQAGHTPRPHPWGCPAGEPWVSVTDFGAPCLRWAEVPPFLERSPPASWAQLRGQRHNFCRSPDGAGRPWCFYGDARGKVDWGYCDCRHGSVRLRGGKNEFEGTVEVYASGVWGTVCSSHWDDSDASVICHQLQLGGKGIAKQTPFSGLGLIPIYWSNVRCRGDEENILLCEKDIWQGGVCPQKMAAAVTCSFSHGPTFPIIRLAGGSSVHEGRVELYHAGQWGTVCDDQWDDADAEVICRQLGLSGIAKAWHQAYFGEGSGPVMLDEVRCTGNELSIEQCPKSSWGEHNCGHKEDAGVSCTPLTDGVIRLAGGKGSHEGRLEVYYRGQWGTVCDDGWTELNTYVVCRQLGFKYGKQASANHFEESTGPIWLDDVSCSGKETRFLQCSRRQWGRHDCSHREDVSIACYPGGEGHRLSLGFPVRLMDGENKKEGRVEVFINGQWGTICDDGWTDKDAAVICRQLGYKGPARARTMAYFGEGKGPIHVDNVKCTGNERSLADCIKQDIGRHNCRHSEDAGVICDYFGKKASGNSNKESLSSVCGLRLLHRRQKRIIGGKNSLRGGWPWQVSLRLKSSHGDGRLLCGATLLSSCWVLTAAHCFKRYGNSTRSYAVRVGDYHTLVPEEFEEEIGVQQIVIHREYRPDRSDYDIALVRLQGPEEQCARFSSHVLPACLPLWRERPQKTASNCYITGWGDTGRAYSRTLQQAAIPLLPKRFCEERYKGRFTGRMLCAGNLHEHKRVDSCQGDSGGPLMCERPGESWVVYGVTSWGYGCGVKDSPGVYTKVSAFVPWIKSVTKL

SEQ ID NO: 10894 - protein, 92 aa, Homo Sapiens
MAVWLAQWLGPLLLVSLWGLLAPASLLRRLGEHIQQFQESSAQGLGLSLGPGAAALPKVGWLEQLLDPFNVSDRRSFLQAIPQPWPQPGAPW

SEQ ID NO: 10895 - protein, 257 aa, Homo Sapiens
MAVWLAQWLGPLLLVSLWGLLAPASLLRRLGEHIQQFQESSAQGLGLSLGPGAAALPKVGWLEQLLDPFNVSDRRSFLQIVLHSLGQKCLSFSRAETVAQLRSTEPQLSGVGDRQWLYQTCTEFGFYVTCENPRCPFSQLPALPSQLDLCEQVFGLSALSVAQAVAQTNSYYGGQTPGANKVLFVNGDTDPWHVLSVTQALGSSESTLLIRTGSHCLDMAPERPSDSPSLRLGRQNIFQQLQTWLKLAKESQIKGEV

SEQ ID NO: 10896 - protein, 99 aa, Homo Sapiens
MAVWLAQWLGPLLLVSLWGLLAPASLLRRLGEHIQQFQESSAQGLGLSLGPGAAALPKVGWLEQLLDPFNVSDRRSFLQMSPVRIPDVLSPSSQHCPPS

SEQ ID NO: 10897 - protein, 145 aa, Homo Sapiens
MAVWLAQWLGPLLLVSLWGLLAPASLLRRLGEHIQQFQESSAQGLGLSLGPGAAALPKVGWLEQLLDPFNVSDRRSFLQRYWVNDQHWVGQDGPIFLHLGGEGSLGPGSVMRDCLAQPGPEVFKLFPSRDSGTAEEHRTSTVWCG

SEQ ID NO: 10898 - protein, 514 aa, Homo Sapiens
MAVWLAQWLGPLLLVSLWGLLAPASLLRRLGEHIQQFQESSAQGLGLSLGPGAAALPKVGWLEQLLDPFNVSDRRSFLQRYWVNDQHWVGQDGPIFLHLGGEGSLGPGSVMRGHPAALAPAWGALVISLEHRFYGLSIPAGGLEMAQLRFLSSRLALADVVSARLALSRLFNISSSSPWICFGGSYAGSLAAWARLKFPHLIFASVASSAPVRAVLDFSEYNDVVSRSLMSTAIGGSLECRAAVSVAFAEVERRLRSGGAAQAALRTELSACGPLGRAENQAELLGALQALVGGVVQYDGQTGAPLSVRQLCGLLLGGGGNRSHSTPYCGLRRAVQIVLHSLGQKCLSFSRAETVAQLRSTEPQLSGVGDRQWLYQTCTEFGFYVTCENPRCPFSQLPALPSQLDLCEQVFGLSALSVAQAVAQTNSYYGGQTPGANKVLFVNGDTDPWHVLSVTQALGSSESTLLIRTGSHCLDMAPERPSDSPSLRLGRQNIFQQLQTWLKLAKESQIKGEV

SEQ ID NO: 10899 - protein, 166 aa, Homo Sapiens
MAVWLAQWLGPLLLVSLWGLLAPASLLRRLGEHIQQFQESSAQGLGLSLGPGAAALPKVGWLEQLLDPFNVSDRRSFLQRYWVNDQHWVGQDGPIFLHLGGEGSLGPGSVMRGHPAALAPAWGALVISLEHRFYGLSIPAGGLEMAQLRFLSSRLALSCTAWARSV

SEQ ID NO: 10900 - protein, 165 aa, Homo Sapiens
  misc_feature (1)..(1): Xaa can be any naturally occurring amino acid
XVMRGHPAALAPAWGALVISLEHRFYGLSIPAGGLEMAQLRFLSSRLALADVVSARLALSRLFNISSSSPWICFGGSYAGSLAAWARLKFPHLIFASVASSAPVRAVLDFSEYNDIVLHSLGQKCLSFSRAETVAQLRSTEPQLSGVGDRQWLYQTCTEFGFYVT

SEQ ID NO: 10901 - protein, 139 aa, Homo Sapiens
  misc_feature (1)..(1): Xaa can be any naturally occurring amino acid
XVMRGHPAALAPAWGALVISLEHRFYGLSIPAGGLEMAQLRFLSSRLALADVVSARLALSRLFNISSSSPWICFGGSYAGSLAAWARLKIVLHSLGQKCLSFSRAETVAQLRSTEPQLSGVGDRQWLYQTCTEFGFYVT

SEQ ID NO: 10902 - protein, 246 aa, Homo Sapiens
MNLLLILTFVAAAVAAPFDDDDKIVGGYICEENSVPYQVSLNSGYHFCGGSLISEQWVVSAGHCYKSAINSKLSGRGCEYHRIQVRLGEHNIEVLEGNEQFINAAKIIRHPKYNSRTLDNDILLIKLSSPAVINSRESLISGWGNTLSSGADYPDELQCLDAPVLSQAECEASYPGKITNNMFCVGFLEGGKDSCQGDSGGPVVSNGELQGIVSWGYGCAQKNRPGVYTKVYNYVDWIKDTIAANS

SEQ ID NO: 10903 - protein, 261 aa, Homo Sapiens
MNLLLILTFVAAAVAAPFDDDDKIVGGYICEENSVPYQVSLNSGYHFCGGSLISEQWVVSAGHCYKSAINSKLSGRGCEYHRIQVRLGEHNIEVLEGNEQFINAAKIIRHPKYNSRTLDNDILLIKLSSPAVINSRVSAISLPTAPPAAGTESLISGWGNTLSSGADYPDELQCLDAPVLSQAECEASYPGKITNNMFCVGFLEGGKDSCQGDSGGPVVSNGELQGIVSWGYGCAQKNRPGVYTKVYNYVDWIKDTIAANS

SEQ ID NO: 10904 - protein, 247 aa, Homo Sapiens
MNLLLILTFVAAAVAAPFDDDDKIVGGYICEENSVPYQVSLNSGYHFCGGSLISEQWVVSAGHCYKSRIQVRLGEHNIEVLEGNEQFINAAKIIRHPKYNSRTLDNDILLIKLSSPAVINSRVSAISLPTAPPAAGTESLISGWGNTLSSGADYPDELQCLDAPVLSQAECEASYPGKITNNMFCVGFLEGGKDSCQGDSGGPVVSNGELQGIVSWGYGCAQKNRPGVYTKVYNYVDWIKDTIAANS

SEQ ID NO: 10905 - protein, 247 aa, Homo Sapiens
MNPLLILAFVGAAVAAPFDDDDKIVGGYICEENSVPYQVSLNSGYHFCGGSLISEQWVVSAGHCYKSRIQVRLGEHNIEVLEGNEQFINAAKIIRHPKYNSRTLDNDILLIKLSSPAVINSRVSAISLPTAPPAAGTESLISGWGNTLSSGADYPDELQCLDAPVLSQAECEASYPGKITNNMFCVGFLEGGKDSCQGDSGGPVVSNGELQGIVSWGYGCAQKNRPGVYTKVYNYVDWIKDTIAANS

SEQ ID NO: 10906 - protein, 81 aa, Homo Sapiens
ARGAAAGAAAGSGWTQEAGVAGGGAVIRTMRPTGHHVAHRGWRGRRTRALAVAGEPAPVGFPRMRSEPAQPPLGTHGGALL

SEQ ID NO: 10907 - protein, 300 aa, Homo Sapiens
MGARGALLLALLLARAGLRKPESQEAAPLSGPCGRRVITSRIVGGEDAELGRWPWQGSLRLWDSHVCGVSLLSHRWALTAAHCFETYSDLSDPSGWMVQFGQLTSMPSFWSLQAYYTRYFVSNIYLSPRYLGNSPYDIALVKLSAPVTYTKHIQPICLQASTFEFENRTDCWVTGWGYIKEDEALPSPHTLQEVQVAIINNSMCNHLFLKYSFRKDIFGDMGDSGGPLACNKNGLWYQIGVVSWGVGCGRPNRPGVYTNISHHFEWIQKLMAQSGMSQPDPSWPLLFFPLLWALPLLGPV

SEQ ID NO: 10908 - protein, 314 aa, Homo Sapiens
MGARGALLLALLLARAGLRKPESQEAAPLSGPCGRRVITSRIVGGEDAELGRWPWQGSLRLWDSHVCGVSLLSHRWALTAAHCFETYSDLSDPSGWMVQFGQLTSMPSFWSLQAYYTRYFVSNIYLSPRYLGNSPYDIALVKLSAPVTYTKHIQPICLQASTFEFENRTDCWVTGWGYIKEDEALPSPHTLQEVQVAIINNSMCNHLFLKYSFRKDIFGDMVCAGNAQGGKDACFGDSGGPLACNKNGLWYQIGVVSWGVGCGRPNRPGVYTNISHHFEWIQKLMAQSGMSQPDPSWPLLFFPLLWALPLLGPV

SEQ ID NO: 10909 - protein, 218 aa, Homo Sapiens
  misc_feature (1)..(1): Xaa can be any naturally occurring amino acid
XLALLLARAGLRKPESQEAAPLSGPCGRRVITSRIVGGEDAELGRWPWQGSLRLWDSHVCGVSLLSHRWALTAAHCFETDLSDPSGWMVQFGQLTSMPSFWSLQAYYTRYFVSNIYLSPRYLGNSPYDIALVKLSAPVTYTKHIQPICLQASTFEFENRTDCWVTGWGYIKEDEGSSGRHHKQLYVQPPLPQVQFPQGHLWRHGLCWQCPRREGCLLR

SEQ ID NO: 10910 - protein, 81 aa, Homo Sapiens
  misc_feature (1)..(1): Xaa can be any naturally occurring amino acid
XRGAAAGAAAGSGWTQEAGVAGGGAVIRTMRPTGHHVAHRGWRGRRTRALAVAGEPAPVGFPRMRSEPAQPPLGTHGGALL

SEQ ID NO: 10911 - protein, 256 aa, Homo Sapiens
  misc_feature (1)..(1): Xaa can be any naturally occurring amino acid
XSLRLWDSHVCGVSLLSHRWALTAAHCFETDLSDPSGWMVQFGQLTSMPSFWSLQAYYTRYFVSNIYLSPRYLGNSPYDIALVKLSAPVTYTKHIQPICLQASTFEFENRTDCWVTGWGYIKEDEALPSPHTLQEVQVAIINNSMCNHLFLKYSFRKDIFGDMVCAGNAQGGKDACFGDSGGPLACNKNGLWYQIGVVSWGVGCGRPNRPGVYTNISHHFEWIQKLMAQSGMSQPDPSWPLLFFPLLWALPLLGPV

SEQ ID NO: 10912 - protein, 317 aa, Homo Sapiens
MVVSGAPPALGGGCLGTFTSLLLLASTAILNAARIPVPPACGKPQQLNRVVGGEDSTDSEWPWIVSIQKNGTHHCAGSLLTSRWVITAAHCFKDNLNKPYLFSVLLGAWQLGNPGSRSQKVGVAWVEPHPVYSWKEGACADIALVRLERSIQFSERVLPICLPDASIHLPPNTHCWISGWGSIQDGVPLPHPQTLQKLKVPIIDSEVCSHLYWRGAGQGPITEDMLCAGYLEGERDACLGDSGGPLMCQVDGAWLLAGIISWGEGCAERNRPGVYISLSAHRSWVEKIVQGVQLRGRAQGGGALRAPSQGSGAAARS

SEQ ID NO: 10913 - protein, 207 aa, Homo Sapiens
MVVSGAPPALGGGCLGTFTSLLLLASTAILNAARIPVPPACGKPQQLNRVVGGEDSTDSEWPWIVSIQKNGTHHCAVPLPHPQTLQKLKVPIIDSEVCSHLYWRGAGQGPITEDMLCAGYLEGERDACLGDSGGPLMCQVDGAWLLAGIISWGEGCAERNRPGVYISLSAHRSWVEKIVQGVQLRGRAQGGGALRAPSQGSGAAARS

SEQ ID NO: 10914 - protein, 116 aa, Homo Sapiens
  misc_feature (1)..(1): Xaa can be any naturally occurring amino acid
XLLSASALFISCSLTALCLGFFYGCEDETENAASTQRASVSSYRRRRHRLLPLASVFSHLLVLRCLPLGKHRFVLFLPQEVRGGHTSGSSVQSRGAQPSSMRPGYLFPQPVGSPSS

SEQ ID NO: 10915 - protein, 154 aa, Homo Sapiens
MAGIPGLLFLLFFLLCAVGQVSPYSAPWKPTWPAYRLPVVLPQSTLNLAKPDFGAEAKLEVSSSCGPQCHKGTPLPTYEEAKQYLSYETLYANGSRTETQVGIYILSSSGDGAQHRDSGSSGKSRRKRQIYGYDSRFSIFGKDFLLNYPFSTSV

SEQ ID NO: 10916 - protein, 383 aa, Homo Sapiens
MAGIPGLLFLLFFLLCAVGQVSPYSAPWKPTWPAYRLPVVLPQSTLNLAKPDFGAEAKLEVSSSCGPQCHKGTPLPTYEEAKQYLSYETLYANGSRTETQVGIYILSSSGDGAQHRDSGSSGKSRRKRQIYGYDSRFSIFGKDFLLNYPFSTSVKLSTGCTGTLVAEKHVLTAAHCIHDGKTYVKGTQKLRVGFLKPKFKDGGRGANDSTSAMPEQMKFQWIRVKRTHVPKGWIKGNANDIGMDYDYALLELKKPHKRKFMKIGVSPPAKQLPGGRIHFSGYDNDRPGNLVYRFCDVKDETYDLLYQQCDAQPGASGSGVYVRMWKRQQQKWERKIIGIFSGHQWVDMNGSPQDFNVAVRITPLKYAQICYWIKGNYLDCREG

SEQ ID NO: 10917 - protein, 82 aa, Homo Sapiens
MSRMRPVCQPWPSPHAPTTVKREGSTVSNSIQPPPPEYQLGSRTWLEAETPGQKRQCSAFMEFTEESRRASHFSSILKIEPV

SEQ ID NO: 10918 - protein, 91 aa, Homo Sapiens
MSRMRPVCQPWPSPHAPTTVKREGSTVSNSIQPPPPEYQLGSRTWLEAETPGQKRQCSAFMEFTEESRRIHQSVGTLLPRVKSFGRPNPHA

SEQ ID NO: 10919 - protein, 290 aa, Homo Sapiens
MRRPAAVPLLLLLCFGSQRAKAATACGRPRMLNRMVGGQDTQEGEWPWQVSIQRNGSHFCGGSLIAEQWVLTAAHCFRNTSETSLYQVLLGARQLVQPGPHAMYARVRQVESNPLYQGTASSADVALVELEAPVPFTNYILPVCLPDPSVIFETGMNCWVTGWGSPSEEDLLPEPRILQKLAVPIIDTPKCNLLYSKDTEFGYQPKTIKNDMLCAGFEEGKKDACKGDSGGPLVCLVGQSWLQAGVISWGEGCARQNRPGVYIRVTAHHNWIHRIIPKLQFQPARLGGQK

SEQ ID NO: 10920 - protein, 40 aa, Homo Sapiens
MRRPAAVPLLLLLCFGSQRAKAATAPLRRPCTRSCWGQGS

SEQ ID NO: 10921 - protein, 40 aa, Homo Sapiens; identical to SEQ ID NO: 10920

SEQ ID NO: 10922 - protein, 304 aa, Homo Sapiens
MCGPDDRCPARWPGPGRAVKCGKGLAAARPGRVERGGAQRGGAGLELHPLLGGRTWRAARDADGCEALGTVAVPFDDDDKIVGGYTCEENSLPYQVSLNSGSHFCGGSLISEQWVVSAAHCYKTRIQVRLGEHNIKVLEGNEQFINAAKIIRHPKYNRDTLDNDIMLIKLSSPAVINARVSTISLPTTPPAAGTECLISGWGNTLSFGADYPDELKCLDAPVLTQAECKASYPGKITNSMFCVGFLEGGKDSCQRDSGGPVVCNGQLQGVVSWGHGCAWKNRPGVYTKVYNYVDWIKDTIAANS

SEQ ID NO: 10923 - protein, 240 aa, Homo Sapiens
MGPAGEVAVPFDDDDKIVGGYTCEENSLPYQVSLNSGSHFCGGSLISEQWVVSAAHCYKTRIQVRLGEHNIKVLEGNEQFINAAKIIRHPKYNRDTLDNDIMLIKLSSPAVINARVSTISLPTTPPAAGTECLISGWGNTLSFGADYPDELKCLDAPVLTQAECKASYPGKITNSMFCVGFLEGGKDSCQRDSGGPVVCNGQLQGVVSWGHGCAWKNRPGVYTKVYNYVDWIKDTIAANS

SEQ ID NO: 10924 - protein, 261 aa, Homo Sapiens
MHMRETSGFTLKKGRSAPLVFHPPDALIAVPFDDDDKIVGGYTCEENSLPYQVSLNSGSHFCGGSLISEQWVVSAAHCYKTRIQVRLGEHNIKVLEGNEQFINAAKIIRHPKYNRDTLDNDIMLIKLSSPAVINARVSTISLPTTPPAAGTECLISGWGNTLSFGADYPDELKCLDAPVLTQAECKASYPGKITNSMFCVGFLEGGKDSCQRDSGGPVVCNGQLQGVVSWGHGCAWKNRPGVYTKVYNYVDWIKDTIAANS

SEQ ID NO: 10925 - protein, 247 aa, Homo Sapiens
MNPFLILAFVGAAVAVPFDDDDKIVGGYTCEENSLPYQVSLNSGSHFCGGSLISEQWVVSAAHCYKTRIQVRLGEHNIKVLEGNEQFINAAKIIRHPKYNRDTLDNDIMLIKLSSPAVINARVSTISLPTTPPAAGTECLISGWGNTLSFGADYPDELKCLDAPVLTQAECKASYPGKITNSMFCVGFLEGGKDSCQRDSGGPVVCNGQLQGVVSWGHGCAWKNRPGVYTKVYNYVDWIKDTIAANS

SEQ ID NO: 10926 - protein, 178 aa, Homo Sapiens
MRETSGFTLKKGRSAPLVFHPPDALIAVPFDDDDKIVGGYTCEENSLPYQVSLNSGSHFCGGSLISEQWVVSAAHCYKTRIQVRLGEHNIKVLEGNEQFINAAKIIRHPKYNRDTLDNDIMLIKLSSPAVINARVSTISLPTTPPAAGTECLISGWGNTLSFGADYPDELKCLDAPVL

SEQ ID NO: 10927 - protein, 236 aa, Homo Sapiens
MRGVSCLQVLLLLVLACGQPRMSSRIVGGRDGRDGEWPWQASIQHRGAHVCGGSLIAPQWVLTAAHCFPRRALPAEYRVRLGALRLGSTSPRTLSVPVRRVLLPPDYSEDGARGDLALLQLRRPVPLSARVQPVCLPVPGARPPPGTPCRVTGWGSLRPGVPLPEWRPLQGVRVPLLDSRTCDGLYHVGADVPQAERIVLPGSLCAGYPQGHKDACQVCTQPPQPPESPPCAQHPP

SEQ ID NO: 10928 - protein, 280 aa, Homo Sapiens
MRGVSCLQVLLLLVLGAAGTQGRKSAACGQPRMSSRIVGGRDGRDGEWPWQASIQHRGAHVCGGSLIAPQWVLTAAHCFPRRALPAEYRVRLGALRLGSTSPRTLSVPVRRVLLPPDYSEDGARGDLALLQLRRPVPLSARVQPVCLPVPGARPPPGTPCRVTGWGSLRPGVPLPEWRPLQGVRVPLLDSRTCDGLYHVGADVPQAERIVLPGSLCAGYPQGHKDACQGDSGGPLTCLQSGSWVLVGVVSWGKGCALPNRPGVYTSVATYSPWIQARVSF

SEQ ID NO: 10929 - protein, 280 aa, Homo Sapiens; identical to SEQ ID NO: 10928

SEQ ID NO: 10930 - protein, 115 aa, Homo Sapiens
MRGVSCLQVLLLLVLGAAGTQGRKSAACGQPRMSSRIVGGRDGRDGEWPWQASIQHRGAHVCGGSLIAPQWVLTAAHCFPSAPPRVATATRSKGAAAGLAHLRRPLPRGRGRAPG

SEQ ID NO: 10931 - protein, 413 aa, Homo Sapiens
MENMLLWLIFFTPGWTLIDGSEMEWDFMWHLRKVPRIVSERTFHLTSPAFEADAKMMVNTVCGIECQKELPTPSLSELEDYLSYETVFENGTRTLTRVKVQDLVLEPTQNITTKGVSVRRKRQVYGTDSRFSILDKRFLTNFPFSTAVKLSTGCSGILISPQHVLTAAHCVHDGKDYVKGSKKLRVGLLKMRNKSGGKKRRGSKRSRREASGGDQREGTREHLRERAKGGRRRKKSGRGQRIAEGRPSFQWTRVKNTHIPKGWARGGMGDATLDYDYALLELKRAHKKKYMELGISPTIKKMPGGMIHFSGFDNDRADQLVYRFCSVSDESNDLLYQYCDAESGSTGSGVYLRLKDPDKKNWKRKIIAVYSGHQWVDVHGVQKDYNVAVRITPLKYAQICLWIHGNDANCAYG

SEQ ID NO: 10932 - protein, 855 aa, Homo Sapiens
MARHLLLPLVMLVISPIPGAFQDSALSPTQEEPEDLDCGRPEPSARIVGGSNAQPGTWPWQVSLHHGGGHICGGSLIAPSWVLSAAHCFMTNGTLEPAAEWSVLLGVHSQDGPLDGAHTRAVAAIVVPANYSQVELGADLALLRLASPASLGPAVWPVCLPRASHRFVHGTACWATGWGDVQEADPLPLPWVLQEVELRLLGEATCQCLYSQPGPFNLTLQILPGMLCAGYPEGRRDTCQGDSGGPLVCEEGGRWFQAGITSFGFGCGRRNRPGVFTAVATYEAWIREQVMGSEPGPAFPTQPQKTQSDPQEPREENCTIALPECGKAPRPGAWPWEAQVMVPGSRPCHGALVSESWVLAPASCFLDPNSSDSPPRDLDAWRVLLPSRPRAERVARLVQHENASWDNASDLALLQLRTPVNLSAASRPVCLPHPEHYFLPGSRCRLARWGRGEPALGPGALLEAELLGGWWCHCLYGRQGAAVPLPGDPPHALCPAYQEKEEVGSCWNDSRWSLLCQEEGTWFLAGIRDFPSGCLRPRAFFPLQTHGPWISHVTRGAYLEDQLAWDWGPDGEETETQTCPPHTEHGACGLRLEAAPVGVLWPWLAEVHVAGDRVCTGILLAPGWVLAATHCVLRPGSTTVPYIEVYLGRAGASSLPQGHQVSRLVISIRLPQHLGLRPPLALLELSSRVEPSPSALPICLHPAGIPPGASCWVLGWKEPQDRVPVAAAVSILTQRICDCLYQGILPPGTLCVLYAEGQENRCEMTSAPPLLCQMTEGSWILVGMAVQGSRELFAAIGPEEAWISQTVGEANFLPPSGSPHWPTGGSNLCPPELAKASGSPHAVYFLLLLTLLIQS

SEQ ID NO: 10933 - protein, 752 aa, Homo Sapiens
MARHLLLPLVMLVISPIPGAFQDSALSPTQEEPEDLDCGRPEPSARIVGGSNAQPGTWPWQVSLHHGGGHICGGSLIAPSWVLSAAHCFMTNGTLEPAAEWSVLLGVHSQDGPLDGAHTRAVAAIVVPANYSQVELGADLALLRLASPASLGPAVWPVCLPRASHRFVHGTACWATGWGDVQEADPLPLPWVLQEVELRLLGEATCQCLYSQPGPFNLTLQILPGMLCAGYPEGRRDTCQGDSGGPLVCEEGGRWFQAGITSFGFGCGRRNRPGVFTAVATYEAWIREQVMGSEPGPAFPTQPQKTQSDPQEPREENCTIALPECGKAPRPGAWPWEAQVMVPGSRPCHGALVSESWVLAPASCFLDPNSSDSPPRDLDAWRVLLPSRPRAERVARLVQHENASWDNASDLALLQLRTPVNLSAASRPVCLPHPEHYFLPGSRCRLARWGRGEPALGPGALLEAELLGGWWCHCLYGRQGAAVPLPGDPPHALCPAYQEKEEVGSCWNDSRWSLLCQEEGTWFLAGIRDFPSGCLRPRAFFPLQTHGPWISHVTRGAYLEDQLAWDWGPDGEETETQTCPPHTEHGACGLRLEAAPVGVLWPWLAEVHVAGDRVCTGILLAPGWVLAATHCVLRPGSTTVPYIEVYLGRAGASSLPQGHQMTSAPPLLCQMTEGSWILVGMAVQGSRELFAAIGPEEAWISQTVGEANFLPPSGSPHWPTGGSNLCPPELAKASGSPHAVYFLLLLTLLIQS

SEQ ID NO: 10934 - protein, 850 aa, Homo Sapiens
MARHLLLPLVMLVISPIPGAFQDSALSPTQEEPEDLDCGRPEPSARIVGGSNAQPGTWPWQVSLHHGGGHICGGSLIAPSWVLSAAHCFMTNGTLEPAAEWSVLLGVHSQDGPLDGAHTRAVAAIVVPANYSQVELGADLALLRLASPASLGPAVWPVCLPRASHRFVHGTACWATGWGDVQEADPLPLPWVLQEVELRLLGEATCQCLYSQPGPFNLTLQILPGMLCAGYPEGRRDTCQGDSGGPLVCEEGGRWFQAGITSFGFGCGRRNRPGVFTAVATYEAWIREQVMGSEPGPAFPTQPQKTQSDPQEPREENCTIALPECGKAPRPGAWPWEAQVMVPGSRPCHGALVSESWVLAPASCFLDPNSSDSPPRDLDAWRVLLPSRPRAERVARLVQHENASWDNASDLALLQLRTPVNLSAASRPVCLPHPEHYFLPGSRCRLARWGRGEPALGPGALLEAELLGGWWCHCLYGRQGAAVPLPGDPPHALCPAYQEKEENDSRWSLLCQEEGTWFLAGIRDFPSGCLRPRAFFPLQTHGPWISHVTRGAYLEDQLAWDWGPDGEETETQTCPPHTEHGACGLRLEAAPVGVLWPWLAEVHVAGDRVCTGILLAPGWVLAATHCVLRPGSTTVPYIEVYLGRAGASSLPQGHQVSRLVISIRLPQHLGLRPPLALLELSSRVEPSPSALPICLHPAGIPPGASCWVLGWKEPQDRVPVAAAVSILTQRICDCLYQGILPPGTLCVLYAEGQENRCEMTSAPPLLCQMTEGSWILVGMAVQGSRELFAAIGPEEAWISQTVGEANFLPPSGSPHWPTGGSNLCPPELAKASGSPHAVYFLLLLTLLIQS

SEQ ID NO: 10935 - protein, 28 aa, Homo Sapiens
  misc_feature (1)..(1): Xaa can be any naturally occurring amino acid
XIEVYLGRAGASSLPQGHQSLWLLLSPS

SEQ ID NO: 10936 - protein, 65 aa, Homo Sapiens
MKYVFYLGVLAERRPCSLFGVPQVSLQPLCGRPHQTQLGAGPSSLLFTKSESDAGKFQEQSQRRY

SEQ ID NO: 10937 - protein, 68 aa, Homo Sapiens
MKYVFYLGVLAGTFFFADSSVQKEDPAPYLVYLKSHFNPCVGVLIKPSWVLAPAHCYLPMNAFYHLKI

SEQ ID NO: 10938 - protein, 235 aa, Homo Sapiens
MKYVFYLGVLAGTFFFADSSVQKEDPAPYLVYLKSHFNPCVGVLIKPSWVLAPAHCYLPNLKVMLGNFKSRVRDGTEQTINPIQIVRYWNYSHSAPQDDLMLIKLAKPAMLNPKVQPLTLATTNVRPGTVCLLSGLDWSQENSGRHPDLRQNLEAPVMSDRECQKTEQGKSHRNSLCVKFVKVFSRIFGEVAVATVICKDKLQGIEVGHFMGGDVGIYTNVYKYVSWIENTAKDK

SEQ ID NO: 10939 - protein, 235 aa, Homo Sapiens; identical to SEQ ID NO: 10938

SEQ ID NO: 10940 - protein, 326 aa, Homo Sapiens
MAAPASVMGPLGPSALGLLLLLLVVAPPRVAALVHRQPENQGISLTGSVACGRPSMEGKILGGVPAPERKWPWQVSVHYAGLHVCGGSILNEYWVLSAAHCFHRDKNIKIYDMYVGLVNLRVAGNHTQWYEVNRVILHPTYEMYHPIGGDVALVQLKTRIVFSESVLPVCLATPEVNLTSANCWATGWGLVSKQGETSDELQEMQLPLILEPWCHLLYGHMSYIMPDMLCAGDILNAKTVCEGDSGGPLVCEFNRSWLQIGIVSWGRGCSNPLYPGVYASVSYFSKWICDNIEITPTPAQPAPALSPALGPTLSVLMAMLAGWSVL

SEQ ID NO: 10941 - protein, 100 aa, Homo Sapiens
MASFLAVVGAPGGVNSCVFDRFHYSVKMGDRSVYNENTSVVVSVQRAFVHPKFSTVTTIRNDLALLQLQHPVNFTSNIQPICIPQENFQVEGRFWGPLGL

SEQ ID NO: 10942 - protein, 293 aa, Homo Sapiens
MSSGGGSRGLLAWLLLLQPWPGQNWAGMAAPRLPSPLLSEEGGENPEASPAPGPEAGPPLNLFTSFPGDSLLCGRTPLRIVGGVDAEEGRWPWQVSVRTKGRHICGGTLVTATWVLTAGHCISSRFHYSVKMGDRSVYNENTSVVVSVQRAFVHPKFSTVTTIRNDLALLQLQHPVNFTSNIQPICIPQENFQVEGRTRCWVTGWGKTPEREKLASEILQDVDQYIMCYEECNKIIQKALSSTKDVIIKGMVCGYKEQGKDSCQGDSGGRLACEYNDTWVQVGIVSWGIGCGR

SEQ ID NO: 10943 - protein, 185 aa, Homo Sapiens
MGPAGCAFTLLLLLGISDRDYHSALQEAEVPIIDRQACEQLYNPIGIFLPALEPVIKEDKICAGDTQNMKDSCKGDSGGPLSCHIDGVWIQTGVVSWGLECGKSLPGVYTNVIYYQKWINATISRANNLDFSDFLFPIVLLSLALLRPSCAFGPNTIHRVGTVAEAVACIQGWEENAWRFSPRGR

SEQ ID NO: 10944 - protein, 328 aa, Homo Sapiens
MGPAGCAFTLLLLLGISVCGQPVYSSRVVGGQDAAAGRWPWQVSLHFDHNFICGGSLVSERLILTAAHCIQPTWTTFSYTVWLGSITVGDSRKRVKYYVSKIVIHPKYQDTTADVALLKLSSQVTFTSAILPICLPSVTKQLAIPPFCWVTGWGKVKESSDRDYHSALQEAEVPIIDRQACEQLYNPIGIFLPALEPVIKEDKICAGDTQNMKDSCKGDSGGPLSCHIDGVWIQTGVVSWGLECGKSLPGVYTNVIYYQKWINATISRANNLDFSDFLFPIVLLSLALLRPSCAFGPNTIHRVGTVAEAVACIQGWEENAWRFSPRGR

SEQ ID NO: 10945 - protein, 385 aa, Homo Sapiens
MGRWCQTVARGQRPRTSAPSRAGALLLLLLLLRSAGCWGAGEAPGALSTADPADQSVQCVPKATCPSSRPRLLWQTPTTQTLPSTTMETQFPVSEGKVDPYRSCGFSYEQDPTLRDPEAVARRWPWMVSVRANGTHICAGTIIASQWVLTVAHCLIWRDVIYSVRVGSPWIDQMTQTASDVPVLQVIMHSRYRAQRFWSWVGQANDIGLLKLKQELKYSNYVRPICLPGTDYVLKDHSRCTVTGWGLSKADGMWPQFRTIQEKEVIILNNKECDNFYHNFTKIPTLVQIIKSQMMCAEDTHREKFCYELTGEPLVCSMEGTWYLVGLVSWGAGCQKSEAPPIYLQVSSYQHWIWDCLNGQALALPAPSRTLLLALPLPLSLLAAL

SEQ ID NO: 10946 - protein, 553 aa, Homo Sapiens
MKWCWGPVLLIAGATVLMEGLQAAQRACGQRGPGPPKPQEGNTVPGEWPWQASVRRQGAHICSGSLVADTWVLTAAHCFEKAAATELNSWSVVLGSLQREGLSPGAEEVGVAALQLPRAYNHYSQGSDLALLQLAHPTTHTPLCLPQPAHRFPFGASCWATGWDQDTSDAPGTLRNLRLRLISRPTCNCIYNQLHQRHLSNPARPGMLCGGPQPGVQGPCQGDSGGPVLCLEPDGHWVQAGIISFASSCAQEDAPVLLTNTAAHSSWLQARVQGAAFLAQSPETPEMSDEDSCVACGSLRTAGPQAGAPSPWPWEARLMHQGQLACGGALVSEEAVLTAAHCFIGRQAPEEWSVGLGTRPEEWGLKQLILHGAYTHPEGGYDMALLLLAQPVTLGASLRPLCLPYPDHHLPDGERGWVLGRARPGAGISSLQTVPVTLLGPRACSRLHAAPGGDGSPILPGMVCTSAVGELPSCEGLSGAPLVHEVRGTWFLAGLHSFGDACQGPARPAVFTALPAYEDWVSSLDWQVYFAEEPEPEAEPGSCLANISQPTSC

SEQ ID NO: 10947 - protein, 203 aa, Homo Sapiens
MDPSKIAHTEYPVNTIIIHEDFDNNSMSNNIALLKTDTAMHFGNLVQSICFLGRMLHTPPVLQNCWVSGWNPTSATGNHMTMSVLRKIFVKDLDMCPLYKLQKTECGSHTKEETKTACLGDPGSPMMCQLQQFDLWVLRGVLNFGGETCPGLFLYTKVEDYSKWITSKAERAGPPLSSLHHWEKLISFSHHGPNATMTQKTYS

SEQ ID NO: 10948 - protein, 296 aa, Homo Sapiens
MDPSKIAHTEYPVNTIIIHEDFDNNSMSNNIALLKTDTAMHFGNLVQSICFLGRMLHTPPVLQNCWVSGWNPTSATGNHMTMSVLRKIFVKDLDMCPLYKLQKTECGSHTKEETKTACLGDPGSPMMCQLQQFDLWVLRGVLNFGGETCPGLFLYTKVEDYSKWITSKAERAGPPLSSLHHWEKLISFSHHGPNATMTQKTYSDSELGHVGSYLQGQRRTITHSRLGNSSRDSLDVREKDVKESGRSPEASVQPLYYDYYGGEVGEGRIFAGQNRLYQPEEIILVSFVLVFFCSSI

SEQ ID NO: 10949 - protein, 186 aa, Homo Sapiens
MVSAAGLSGDGKMRGVLLVLLGLLYSSTSCGVQKASVFYGPDPKEGLVSSMEFPWVVSLQDSQYTHLAFGCILSEFWVLSIASAIQNRKDIVVIVGISNMDPSKIAHTEYPVNTIIIHEDFDNNSMSNNIALLKTDTAMHFGNLVQSICFLGRMLHTPPVLQNCWVSGWNPTSATGNHMTMSVLRK

SEQ ID NO: 10950 - protein, 395 aa, Homo Sapiens
MVSAAGLSGDGKMRGVLLVLLGLLYSSTSCGVQKASVFYGPDPKEGLVSSMEFPWVVSLQDSQYTHLAFGCILSEFWVLSIASAIQNRKDIVVIVGISNMDPSKIAHTEYPVNTIIIHEDFDNNSMSNNIALLKTDTAMHFGNLVQSICFLGRMLHTPPVLQNCWVSGWNPTSATGNHMTMSVLRKIFVKDLDMCPLYKLQKTECGSHTKEETKTACLGDPGSPMMCQLQQFDLWVLRGVLNFGGETCPGLFLYTKVEDYSKWITSKAERAGPPLSSLHHWEKLISFSHHGPNATMTQKTYSDSELGHVGSYLQGQRRTITHSRLGNSSRDSLDVREKDVKESGRSPEASVQPLYYDYYGGEVGEGRIFAGQNRLYQPEEIILVSFVLVFFCSSI

SEQ ID NO: 10951 - protein, 395 aa, Homo Sapiens; identical to SEQ ID NO: 10950

SEQ ID NO: 10952 - protein, 352 aa, Homo Sapiens
MLLFSVLLLLSLVTGTQLGPRTPLPEAGVAILGRARGAHRPQPPHPPSPVSECGDRSIFEGRTRYSRITGGMEAEVGEFPWQVSIQARSEPFCGGSILNKWWILTAAHCLYSEELFPEELSVVLGTNDLTSPSMEIKEVASIILHKDFKRANMDNDIALLLLASPIKLDDLKVPICLPTQPGPATWRECWVAGWGQTNAADKNSVKTDLMKAPMVIMDWEECSKMFPKLTKNMLCAGYKNESYDACKGDSGGPLVCTPEPGEKWYQVGIISWGKSCGEKNTPGIYTSLVNYNLWIEKVTQLEGRPFNAEKRRTSVKQKPMGSPVSGVPEPGSPRSWLLLCPLSHVLFRAILY

SEQ ID NO: 10953 - protein, 276 aa, Homo Sapiens
MLLFSVLLLLSLVTGTQLGPRTPLPEAGVAILGRARGAHRPQPPHPPSPVSECGDRSIFEGRTRYSRITGGMEAEVGEFPWQVSIQARSEPFCGGSILNKWWILTAAHCLYSEELFPEELSVVLGTNDLTSPSMEIKEVASIILHKDFKRANMDNDIALLLLASPIKLDDLKVPICLPTQPGPATWRECWVAGWGQTNAADKNSVKTDLMKAPMVIMDWEECSKMFPKLTKNMLCAGYKNESYDACKQSYFPTLQRMNTGSSQTKPPGSHTFHLQN

SEQ ID NO: 10954 - protein, 182 aa, Homo Sapiens
  misc_feature (1)..(1): Xaa can be any naturally occurring amino acid
XWKPAPPSPVPSSHWMLTKCFPFSFPLSFFPPECGDRSIFEGRTRYSRITGGMEAEVGEFPWQVSIQARSEPFCGGSILNKWWILTAAHCLYSEELFPEELSVVLGTNDLTSPSMEIKEVASIILHKDFKRANMDNDIALLLLASPIKLDDLKVPICLPTQPGPATWRECWVAGWGQTNAGM

SEQ ID NO: 10955 - protein, 604 aa, Homo Sapiens
MLLAVLLLLPLPSSWFAHGHPLYTRLPPSALQVLSAQGTQALQAAQRSAQWAINRVAMEIQHRSHECRGSGRPRPQALLQDPPEPGPCGERRPSTANVTRAHGRIVGGSAAPPGAWPWLVRLQLGGQPLCGGVLVAASWVLTAAHCFVGAPNELLWTVTLAEGSRGEQAEEVPVNRILPHPKFDPRTFHNDLALVQLWTPVSPGGSARPVCLPQEPQEPPAGTACAIAGWGALFEDGPEAEAVREARVPLLSTDTCRRALGPGLRPSTMLCAGYLAGGVDSCQGDSGGPLTCSEPGPRPREVLFGVTSWGDGCGEPGKPGVYTRVAVFKDWLQEQMSAASSSREPSCRELLAWDPPQELQADAARLCAFYARLCPGSQGACARLAHQQCLQRRRRCELRSLAHTLLGLLRNAQELLGPRPGLRRLAPALALPAPALRESPLHPARELRLHSGSRAAGTRFPKRRPEPRGEANGCPGLEPLRQKLAALQGAHAWILQVPSEHLAMNFHEVLADLGSKTLTGLFRAWVRAGLGGRHVAFSGLVGLEPATLARSLPRLLVQALQAFRVAALAEGEPEGPWMDVGQGPGLERKGHHPLNPQVPPARQP

SEQ ID NO: 10956 - protein, 603 aa, Homo Sapiens
MLLAVLLLLPLPSSWFAHGHPLYTRLPPSALQVLSAQGTQALQAAQRSAQWAINRVAMEIQHRSHECRGSGRPRPQALLQDPPEPGPCGERRPSTANVTRAHGRIVGGSAAPPGAWPWLVRLQLGGQPLCGGVLVAASWVLTAAHCFVGAPNELLWTVTLAEGSRGEQAEEVPVNRILPHPKFDPRTFHNDLALVQLWTPVSPGGSARPVCLPQEPQEPPAGTACAIAGWGALFEDGPEAEAVREARVPLLSTDTCRRALGPGLRPSTMLCAGYLAGGVDSCQGDSGGPLTCSEPGPRPREVLFGVTSWGDGCGEPGKPGVYTRVAVFKDWLQEQMSASSSREPSCRELLAWDPPQELQADAARLCAFYARLCPGSQGACARLAHQQCLQRRRRCELRSLAHTLLGLLRNAQELLGPRPGLRRLAPALALPAPALRESPLHPARELRLHSGSRAAGTRFPKRRPEPRGEANGCPGLEPLRQKLAALQGAHAWILQVPSEHLAMNFHEVLADLGSKTLTGLFRAWVRAGLGGRHVAFSGLVGLEPATLARSLPRLLVQALQAFRVAALAEGEPEGPWMDVGQGPGLERKGHHPLNPQVPPARQP

SEQ ID NO: 10957 - protein, 283 aa, Homo Sapiens
MGLGLRGWGRPLLTVATALMLPVKPPAGSWGAQIIGGHEVTPHSRPYMASVRFGGQHHCGGFLLRARWVVSAAHCFSHRDLRTGLVVLGAHVLSTAEPTQQVFGIDALTTHPDYHPMTHANDICLLRLNGSAVLGPAVGLLRPPGRRARPPTAGTRCRVAGWGFVSDFEELPPGLMEAKVRVLDPDVCNSSWKGHLTLTMLCTRSGDSHRRGFCSADSGGPLVCRNRAHGLVSFSGLWCGDPKTPDVYTQVSAFVAWIWDVVRRSSPQPGPLPGTTRPPGEAA

SEQ ID NO: 10958 - protein, 282 aa, Homo Sapiens
MGLGLRGWGRPLLTVATALMLPVKPPGSWGAQIIGGHEVTPHSRPYMASVRFGGQHHCGGFLLRARWVVSAAHCFSHRDLRTGLVVLGAHVLSTAEPTQQVFGIDALTTHPDYHPMTHANDICLLRLNGSAVLGPAVGLLRPPGRRARPPTAGTRCRVAGWGFVSDFEELPPGLMEAKVRVLDPDVCNSSWKGHLTLTMLCTRSGDSHRRGFCSADSGGPLVCRNRAHGLVSFSGLWCGDPKTPDVYTQVSAFVAWIWDVVRRSSPQPGPLPGTTRPPGEAA

SEQ ID NO: 10959 - protein, 241 aa, Homo Sapiens
MKFILLWALLNLTVALAFNPDYTVSSTPPYLVYLKSDYLPCAGVLIHPLWVITAAHCNLPKLRVILGVTIPADSNEKHLQVIGYEKMIHHPHFSVTSIDHDIMLIKLKTEAELNDYVKLANLPYQTISENTMCSVSTWSYNVCDIYKEPDSLQTVNISVISKPQCRDAYKTYNITENMLCVGIVPGRRQPCKEVSAAPAICNGMLQGILSFADGCVLRADVGIYAKIFYYIPWIENVIQNN

SEQ ID NO: 10960 - protein, 241 aa, Homo Sapiens; identical to SEQ ID NO: 10959

SEQ ID NO: 10961 - protein, 108 aa, Homo Sapiens [sequence omitted]

SEQ ID NO: 10962 - protein, 343 aa, Homo Sapiens
MAQKGVLGPGQLGAVAILLYLGLLRSGTGAEGAEAPCGVAPQARITGGSSAVAGQWPWQVSITYEGVHVCGGSLVSEQWVLSAAHCFPSEHHKEAYEVKLGAHQLDSYSEDAKVSTLKDIIPHPSYLQEGSQGDIALLQLSRPITFSRYIRPICLPAANASFPNGLHCTVTGWGHVAPSVSLLTPKPLQQLEVPLISRETCNCLYNIDAKPEEPHFVQEDMVCAGYVEGGKDACQGDSGGPLSCPVEGLWYLTGIVSWGDACGARNRPGVYTLASSYASWIQSKVTELQPRVVPQTQESQPDSNLCGSHLAFSSAPAQGLLRPILFLPLGLALGLLSPWLSEH

SEQ ID NO: 10963 - protein, 195 aa, Homo Sapiens
MAQKGVLGPGQLGAVAILLYLGLLRSGTGAEGAEAPCGVAPQARITGGSSAVAGQWPWQVSITYEGVHVCGGSLVSEQWVLSAAHCFPSYLQEGSQGDIALLQLSRPITFSRYIRPICLPAANASFPNGLHCTVTGWGHVAPSVSLLTPKPLQQLEVPLISRETCNCLYNIDAKPEEPHFVQEDMVCAGYVEGGK

SEQ ID NO: 10964 - protein, 289 aa, Homo Sapiens
MAQKGVLGPGQLGAVAILLYLGLLRSGTGAEGAEAPCGVAPQARITGGSSAVAGQWPWQVSTLKDIIPHPSYLQEGSQGDIALLQLSRPITFSRYIRPICLPAANASFPNGLHCTVTGWGHVAPSVSLLTPKPLQQLEVPLISRETCNCLYNIDAKPEEPHFVQEDMVCAGYVEGGKDACQGDSGGPLSCPVEGLWYLTGIVSWGDACGARNRPGVYTLASSYASWIQSKVTELQPRVVPQTQESQPDSNLCGSHLAFSSAPAQGLLRPILFLPLGLALGLLSPWLSEH

SEQ ID NO: 10965 - protein, 218 aa, Homo Sapiens
EYQVVIGNDTTHYIIDDLEPASNYTFYIVAYMPMGASQMSDHVTQNTLEDVPLRPPEISLTSRSPTDILISWLPIPAKYRRGQVVLYRLSFRLSTENSIQVLELPGTTHEYLLEGLKPDSVYLVRITAATRVGLGESSVWTSHRTPKATSVKAPKSPELHLEPLNCTTISVRWQQDVEDTAAIQGYKLYYKEEGQQENGPIFLDTKDLLYTLSGLARI

SEQ ID NO: 10966 - protein, 137 aa, Homo Sapiens
MAPPLRPLARLRPPGMLLRALLLLLLLSPLPGVWCFSELSFVKEPQDVTVTRKDPVVLDCQAHGEVPIKVTWLKNGAKMSENKRIEVLSNGSLYISEVEGRRGEQSDEGFYQCLAMNKYGAILSQKAHLALSRIGST

SEQ ID NO: 10967 - protein, 1150 aa, Homo Sapiens
MAPPLRPLARLRPPGMLLRALLLLLLLSPLPGVWCFSELSFVKEPQDVTVTRKDPVVLDCQAHGEVPIKVTWLKNGAKMSENKRIEVLSNGSLYISEVEGRRGEQSDEGFYQCLAMNKYGAILSQKAHLALSTISAFEVQPISTEVHEGGVARFACKISSHPPAVITWEFNRTTLPMTMDRITALPTGVLQIYDVSQRDSGNYRCIAATVAHRRKSMEASLTVIPAKESKSFHTPTIIAGPQNITTSLHQTVVLECMATGNPKPIISWSRLDHKSIDVFNTRVLGNGNLMISDVRLQHAGVYVCRATTPGTRNFTVAMATLTVLAPPSFVEWPESLTRPRAGTARFVCQAEGIPSPKMSWLKNGRKIHSNGRIKMYNSKLVINQIIPEDDAIYQCMAENSQGSILSRARLTVVMSEDRPSAPYNVHAETMSSSAILLAWERPLYNSDKVIAYSVHYMKAEGLNNEEYQVVIGNDTTHYIIDDLEPASNYTFYIVAYMPMGASQMSDHVTQNTLEDVPLRPPEISLTSRSPTDILISWLPIPAKYRRGQVVLYRLSFRLSTENSIQVLELPGTTHEYLLEGLKPDSVYLVRITAATRVGLGESSVWTSHRTPKATSVKAPKSPELHLEPLNCTTISVRWQQDVEDTAAIQGYKLYYKEEGQQENGPIFLDTKDLLYTLSGLDPRRKYHVRLLAYNNIDDGYQADQTVSTPGCVSVRDRMVPPPPPPHHLYAKANTSSSIFLHWRRPAFTAAQIINYTIRCNPVGLQNASLVLYLQTSETHMLVQGLEPNTKYEFAVRLHVDQLSSPWSPVVYHSTLPEAPAGPPVGVKVTLIEDDTALVSWKPPDGPETVVTRYTILYASRKAWIAGEWQVLHREGAITMALLENLVAGNVYIVKISASNEVGEGPFSNSVELAVLPKETSESNQRPKRLDSADAKVYSGYYHLDQKSMTGIAVGVGIALTCILICVLILIYRSKARKSSASKTAQNGTQQLPRTSASLASGNEVGKNLEGAVGNEESLMPMIMPNSFIDAKGGTDLIINSYGPIIKNNSKKKWFFFQDSKKIQVEQPQRRFTPAVCFYQPGTTVLISDEDSPSSPGQTTSFSRPFGVAADTEHSANSEGSHETGDSGRFSHESNDEIHLSSVISTTPPNL

SEQ ID NO: 10968 - protein, 22 aa, Homo Sapiens
MSENKRIEVLSNGSLYISEVEG

SEQ ID NO: 10969 - protein, 256 aa, Homo Sapiens
MAHRPPSPALASVLLALLLSGAARAAEIVGGHEAQPHSRPYMASLQMRGNPGSHFCGGTLIHPSFVLTAAHCLRDIPQRLVNVVLGAHNVRTQEPTQQHFSVAQVFLNNYDAENKLNDVLLIQLSSPANLSASVATVQLPQQDQPVPHGTQCLAMGWGRVGAHDPPAQVLQELNVTVVTFFCRPHNICTFVPRRKAGICFGDSGGPLICDGIIQGIDSFVIWGCATRLFPDFFTRVALYVDWIRSTLRRVEAKGRP

SEQ ID NO: 10970 - protein, 215 aa, Homo Sapiens
MASLQMRGNPGSHFCGGTLIHPSFVLTAAHCLRDIPQRLVNVVLGAHNVRTQEPTQQHFSVAQVFLNNYDAENKLNDVLLIQLSSPANLSASVATVQLPQQDQPVPHGTQCLAMGWGRVGAHDPPAQVLQELNVTVVTFFCRPHNICTFVPRRKAGICFGDSGGPLICDGIIQGIDSFVIWGCATRLFPDFFTRVALYVDWIRSTLRRVEAKGRP

SEQ ID NO: 10971 - protein, 527 aa, Homo Sapiens [sequence omitted]

SEQ ID NO: 10972 - protein, 524 aa, Homo Sapiens
MYALFLLASLLGAALAGPVLGLKECTRGSAVWCQNVKTASDCGAVKHCLQTVWNKPTVKSLPCDICKDVVTAAGDMLKDNATEEEILVYLEKTCDWLPKPNMSASCKEIVDSYLPVILDIIKGEMSRPGEVCSALNLCESLQKHLAELNHQKQLESNKIPELDMTEVVAPFMANIPLLLYPQDGPRSKPQPKDNGDVCQDCIQMVTDIQTAVRTNSTFVQALVEHVKEECDRLGPGMADICKNYISQYSEIAIQMMMHMQPKEICALVGFCDEVKEMPMQTLVPAKVASKNVIPALELVEPIKKHEVPAKSDVYCEVCEFLVKEVTKLIDNNKTEKEILDAFDKMCSKLPKSLSEECQEVVDTYGSSILSILLEEVSPELVCSMLHLCSGTRLPALTVHVTQPKDGGFCEVCKKLVGYLDRNLEKNSTKQEILAALEKGCSFLPDPYQKQCDQFVAEYEPVLIEILVEVMDPSFVCLKIGACPSAHKPLLGTEKCIWGPSYWCQNTETAAQCNAVEHCKRHVWN

SEQ ID NO: 10973 - protein, 240 aa, Homo Sapiens
MYALFLLASLLGAALAGPVLGLKECTRGSAVWCQNVKTASDCGAVKHCLQTVWNKPTVKSLPCDICKDVVTAAGDMLKDNATEEEILVYLEVSPELVCSMLHLCSGTRLPALTVHVTQPKDGGFCEVCKKLVGYLDRNLEKNSTKQEILAALEKGCSFLPDPYQKQCDQFVAEYEPVLIEILVEVMDPSFVCLKIGACPSAHKPLLGTEKCIWGPSYWCQNTETAAQCNAVEHCKRHVWN

SEQ ID NO: 10974 - protein, 167 aa, Homo Sapiens
  misc_feature (1)..(1): Xaa can be any naturally occurring amino acid
XCIQMVTDIQTAVRTNSTFVQALVEHVKEECDRLGPGMADICKNYISQYSEIAIQMMMHMQDQQPKEICALVGFCDEVKEMPMQTLVPAKVASKNVIPALELVEPIKKHEVPAKSDVYCEVCEFLVKEVTKLIDNNKTEKEILDAFDKMCSKLPKSLSEECQEVVDT

SEQ ID NO: 10975 - protein, 521 aa, Homo Sapiens
MLCALLLLPSLLGATRASPTSGPQECAKGSTVWCQDLQTAARCGAVGYCQGAVWNKPTAKSLPCDVCQDIAAAAGNGLNPDATESDILALVMKTCEWLPSQESSAGCKWMVDAHSSAILSMLRGAPDSAPAQVCTALSLCEPLQRHLATLRPLSKEDTFEAVAPFMANGPLTFHPRQAPEGALCQDCVRQVSRLQEAVRSNLTLADLNIQEQCESLGPGLAVLCKNYLFQFFVPADQALRLLPPQELCRKGGFCEELGAPARLTQVVAMDGVPSLELGLPRKQSEMQMKAGVTCEVCMNVVQKLDHWLMSNSSELMITHALERVCSVMPASITKECIILVDTYSPSLVQLVAKITPEKVCKFIRLCGNRRRARAVHDAYAIVPSPEWDAENQGSFCNGCKRLLTVSSHNLESKSTKRDILVAFKGGCSILPLPYMIQCKHFVTQYEPVLIESLKDMMDPVAVCKKVGACHGPRTPLLGTDQCALGPSFWCRSQEAAKLCNAVQHCQKHVWKEMHLHAGEHA

SEQ ID NO: 10976 - protein, 426 aa, Homo Sapiens
MGTLSAPPCTQRIKWKGLLLTASLLNFWNLPTTAQVTIEAEPTKVSEGKDVLLLVHNLPQNLTGYIWYKGQMRDLYHYITSYVVDGEIIIYGPAYSGRETAYSNASLLIQNVTREDAGSYTLHIIKGDDGTRGVTGRFTFTLHLETPKPSISSSNLNPRETMEAVSLTCDPETPDASYLWWMNGQSLPMTHSLKLSETNRTLFLLGVTKYTAGPYECEIRNPVSASRSDPVTLNLLPKLPKPYITINNLNPRENKDVLNFTCEPKSENYTYIWWLNGQSLPVSPRVKRPIENRILILPSVTRNETGPYQCEIRDRYGGIRSDPVTLNVLYGPDLPRIYPSFTYYRSGEVLYLSCSADSNPPAQYSWTINEKFQLPGQKLFIRHITTKHSGLYVCSVRNSATGKESSKSMTVEVSGKWIPASLAIGF

SEQ ID NO: 10977 - protein, 428 aa, Homo Sapiens
MGTLSAPPCTQRIKWKGLLLTASLLNFWNLPTTAQVTIEAEPTKVSEGKDVLLLVHNLPQNLTGYIWYKGQMRDLYHYITSYVVDGEIIIYGPAYSGRETAYSNASLLIQNVTREDAGSYTLHIIKGDDGTRGVTGRFTFTLHLETPKPSISSSNLNPRETMEAVSLTCDPETPDASYLWWMNGQSLPMTHSLKLSETNRTLFLLGVTKYTAGPYECEIRNPVSASRSDPVTLNLLPKLPKPYITINNLNPRENKDVLNFTCEPKSENYTYIWWLNGQSLPVSPRVKRPIENRILILPSVTRNETGPYQCEIRDRYGGIRSDPVTLNVLYGPDLPRIYPSFTYYRSGEVLYLSCSADSNPPAQYSWTINEKFQLPGQKLFIRHITTKHSGLYVCSVRNSATGKESSKSMTVEVSAYSSSINYTSGNRN

SEQ ID NO: 10978 - protein, 419 aa, Homo Sapiens
MGTLSAPPCTQRIKWKGLLLTASLLNFWNLPTTAQVTIEAEPTKVSEGKDVLLLVHNLPQNLTGYIWYKGQMRDLYHYITSYVVDGEIIIYGPAYSGRETAYSNASLLIQNVTREDAGSYTLHIIKGDDGTRGVTGRFTFTLHLETPKPSISSSNLNPRETMEAVSLTCDPETPDASYLWWMNGQSLPMTHSLKLSETNRTLFLLGVTKYTAGPYECEIRNPVSASRSDPVTLNLLPKLPKPYITINNLNPRENKDVLNFTCEPKSENYTYIWWLNGQSLPVSPRVKRPIENRILILPSVTRNETGPYQCEIRDRYGGIRSDPVTLNVLYGPDLPRIYPSFTYYRSGEVLYLSCSADSNPPAQYSWTINEKFQLPGQKLFIRHITTKHSGLYVCSVRNSATGKESSKSMTVEVSDWTVP

SEQ ID NO: 10979 - protein, 417 aa, Homo Sapiens
MGTLSAPPCTQRIKWKGLLLTASLLNFWNLPTTAQVTIEAEPTKVSEGKDVLLLVHNLPQNLTGYIWYKGQMRDLYHYITSYVVDGEIIIYGPAYSGRETAYSNASLLIQNVTREDAGSYTLHIIKGDDGTRGVTGRFTFTLHLETPKPSISSSNLNPRETMEAVSLTCDPETPDASYLWWMNGQSLPMTHSLKLSETNRTLFLLGVTKYTAGPYECEIRNPVSASRSDPVTLNLLPKLPKPYITINNLNPRENKDVLNFTCEPKSENYTYIWWLNGQSLPVSPRVKRPIENRILILPSVTRNETGPYQCEIRDRYGGIRSDPVTLNVLYGPDLPRIYPSFTYYRSGEVLYLSCSADSNPPAQYSWTINEKFQLPGQKLFIRHITTKHSGLYVCSVRNSATGKESSKSMTVEVSEAL

SEQ ID NO: 10980 - protein, 326 aa, Homo Sapiens
MGTLSAPPCTQRIKWKGLLLTASLLNFWNLPTTAQVTIEAEPTKVSEGKDVLLLVHNLPQNLTGYIWYKGQMRDLYHYITSYVVDGEIIIYGPAYSGRETAYSNASLLIQNVTREDAGSYTLHIIKGDDGTRGVTGRFTFTLHPKLPKPYITINNLNPRENKDVLNFTCEPKSENYTYIWWLNGQSLPVSPRVKRPIENRILILPSVTRNETGPYQCEIRDRYGGIRSDPVTLNVLYGPDLPRIYPSFTYYRSGEVLYLSCSADSNPPAQYSWTINEKFQLPGQKLFIRHITTKHSGLYVCSVRNSATGKESSKSMTVEVSDWTVP

SEQ ID NO: 10981 - protein, 324 aa, Homo Sapiens
MGTLSAPPCTQRIKWKGLLLTASLLNFWNLPTTAQVTIEAEPTKVSEGKDVLLLVHNLPQNLTGYIWYKGQMRDLYHYITSYVVDGEIIIYGPAYSGRETAYSNASLLIQNVTREDAGSYTLHIIKGDDGTRGVTGRFTFTLHPKLPKPYITINNLNPRENKDVLNFTCEPKSENYTYIWWLNGQSLPVSPRVKRPIENRILILPSVTRNETGPYQCEIRDRYGGIRSDPVTLNVLYGPDLPRIYPSFTYYRSGEVLYLSCSADSNPPAQYSWTINEKFQLPGQKLFIRHITTKHSGLYVCSVRNSATGKESSKSMTVEVSEAL

SEQ ID NO: 10982 - protein, 154 aa, Homo Sapiens
MRDLYHYITSYVVDGEIIIYGPAYSGRETAYSNASLLIQNVTREDAGSYTLHIIKGDDGTRGVTGRFTFTLHLETPKPSISSSNLNPRETMEAVSLTCDPETPDASYLWWMNGQSLPMTHSLKLSETNRTLFLLGVTKYTAGPYECEIRNPVSA

SEQ ID NO: 10983 - protein, 242 aa, Homo Sapiens
  misc_feature (1)..(1): Xaa can be any naturally occurring amino acid
XSYVVDGEIIIYGPAYSGRETAYSNASLLIQNVTREDAGSYTLHIIKGDDGTRGVTGRFTFTLHLETPKPSISSSNLNPRETMEAVSLTCDPETPDASYLWWMNGQSLPMTHSLKLSETNRTLFLLGVTKYTAGPYECEIRNPVSASRSDPVTLNLLHGPDLPRIYPSFTYYRSGEVLYLSCSADSNPPAQYSWTINEKFQLPGQKLFIRHITTKHSGLYVCSVRNSATGKESSKSMTVEVS

SEQ ID NO: 10984 - protein, 335 aa, Homo Sapiens
MGPLSAPPCTEHIKWKGLLLTALLLNFWNLPTTAQVMIEAQPPKVSEGKDVLLLVHNLPQNLTGYIWYKGQIRDLYHYITSYVVDGQIIIYGPAYSGRETVYSNASLLIQNVTREDAGSYTLHIIKRGDGTRGVTGYFTFTLYLETPKPSISSSNLNPREAMETVILTCNPETPDASYLWWMNGQSLPMTHRMQLSETNRTLFLFGVTKYTAGPYECEIWNSGSASRSDPVTLNLLHGPDLPRIFPSVTSYYSGENLDLSCFANSNPPAQYSWTINGKFQLSGQKLFIPQITPKHNGLYACSARNSATGEESSTSLTIRVIAPPGLGTFAFNNPT

SEQ ID NO: 10985 - protein, 320 aa, Homo Sapiens
MGPLSAPPCTEHIKWKGLLLTALLLNFWNLPTTAQVMIEAQPPKVSEGKDVLLLVHNLPQNLTGYIWYKGQIRDLYHYITSYVVDGQIIIYGPAYSGRETVYSNASLLIQNVTREDAGSYTLHIIKRGDGTRGVTGYFTFTLYPKLPMPYITINNLNPRENKDVLTFTCEPKSENYAYIWWLNCQSLPVSPRVKRPIENRILILPSVTRNETGPYQCEIRDRYGGIRSDSVTLNVLYGPDLPRIFPSVTSYYSGENLDLSCFANSNPPAQYSWTINGKFQLSGQKLFIPQITPKHNGLYACSARNSATGEESSTSLTIRV

SEQ ID NO: 10986 - protein, 213 aa, Homo Sapiens
MGPLSAPPCTEHIKWKGLLLTVETPKPSISSSNLNPREAMETVILTCNPETPDASYLWWMNGQSLPMTHRMQLSETNRTLFLFGVTKYTAGPYECEIWNSGSASRSDPVTLNLLHGPDLPRIFPSVTSYYSGENLDLSCFANSNPPAQYSWTINGKFQLSGQKLFIPQITPKHNGLYACSARNSATGEESSTSLTIRVIAPPGLGTFAFNNPT

SEQ ID NO: 10987 - protein, 213 aa, Homo Sapiens; identical to SEQ ID NO: 10986

SEQ ID NO: 10988 - protein, 126 aa, Homo Sapiens
MIEAQPPKVSEGKDVLLLVHNLPQNLTGYIWYKGQIRDLYHYITSYVVDGQIIIYGPAYSGRETVYSNASLLIQNVTREDAGSYTLHIIKRGDGTRGVTGYFTFTLYRHSLDSALSLEVTGSSQSL

SEQ ID NO: 10989 - protein, 335 aa, Homo Sapiens
MGPLSAPPCTEHIKWKGLLVTASLLNFWNLPTTAQVTIEAQPPKVSEGKDVLLLVHNLPQNLTGYIWYKGQIRDLYHYITSYVVDGQIIIYGPAYSGRETAYSNASLLIQNVTREDAGSYTLHIIKRGDGTRGVTGYFTFTLYLETPKPSISSSNLNPREAMETVILTCDPETPDTSYQWWMNGQSLPMTHRFQLSETNRTLFLFGVTKYTAGPYECEIRNSGSASRSDPVTLNLLHGPDLPRIHPSYTNYRSGDNLYLSCFANSNPPAQYSWTINGKFQQSGQNLFIPQITTKHSGLYVCSVRNSATGEESSTSLTVKVSASTRIGLLPLLNPT

SEQ ID NO: 10990 - protein, 117 aa, Homo Sapiens
  misc_feature (1)..(1): Xaa can be any naturally occurring amino acid
XRNSGSASRSDPVTLNLLHGPDLPRIHPSYTNYRSGDNLYLSCFANSNPPAQYSWTINGKFQQSGQNLFIPQITTKHSGLYVCSVRNSATGEESSTSLTVKVSASTRIGLLPLLNPT

SEQ ID NO: 10991 - protein, 428 aa, Homo Sapiens
MGPLSAPPCTQRITWKGLLLTALLLNFWNLPTTAQVTIEAEPTKVSKGKDVLLLVHNLPQNLAGYIWYKGQMKDLYHYITSYVVDGQIIIYGPAYSGRETVYSNASLLIQNVTREDAGSYTLHIVKRGDGTRGETGHFTFTLYLETPKPSISSSNLYPREDMEAVSLTCDPETPDASYLWWMNGQSLPMTHSLQLSKNKRTLFLFGVTKYTAGPYECEIRNPVSASRSDPVTLNLLPKLPKPYITINNLNPRENKDVLAFTCEPKSENYTYIWWLNGQSLPVSPRVKRPIENRILILPSVTRNETGPYQCEIQDRYGGIRSYPVTLNVLYGPDLPRIYPSFTYYHSGENLYLSCFADSNPPAEYSWTINGKFQLSGQKLFIPQITTKHSGLYACSVRNSATGMESSKSMTVKVSAPSGTGHLPGLNPL

SEQ ID NO: 10992 - protein, 475 aa, Homo Sapiens
MGPLSAPPCTQRITWKGLLLTALLLNFWNLPTTAQVTIEAEPTKVSKGKDVLLLVHNLPQNLAGYIWYKGQMKDLYHYITSYVVDGQIIIYGPAYSGRETVYSNASLLIQNVTREDAGSYTLHIVKRGDGTRGETGHFTFTLYLETPKPSISSSNLYPREDMEAVSLTCDPETPDASYLWWMNGQSLPMTHSLQLSKNKRTLFLFGVTKYTAGPYECEIRNPVSASRSDPVTLNLLPKLPKPYITINNLNPRENKDVLAFTCEPKSENYTYIWWLNGQSLPVSPRVKRPIENRILILPSVTRNETGPYQCEIQDRYGGIRSYPVTLNVLYGPDLPRIYPSFTYYHSGENLYLSCFADSNPPAEYSWTINGKFQLSGQKLFIPQITTKHSGLYACSVRNSATGMESSKSMTVKVSDSCFHSSSKYLPSATVQNCFLFKEIYEKTLTRTLEYKFLITSRSYHWTKNFQNFNEQADTS

SEQ ID NO: 10993 - protein, 428 aa, Homo Sapiens; identical to SEQ ID NO: 10991

SEQ ID NO: 10994 - protein, 91 aa, Homo Sapiens
MKDLYHYITSYVVDGQIIIYGPAYSGRETVYSNASLLIQNVTREDAGSYTLHIVKRGDGTRGETGHFTFTLYRHSLDSALSLEVTGSSQPL

SEQ ID NO: 10995 - protein, 326 aa, Homo Sapiens
MGPLSAPPCTQRITWKGVLLTASLLNFWNPPTTAQVTIEAQPPKVSEGKDVLLLVHNLPQNLAGYIWYKGQMTYLYHYITSYVVDGQRIIYGPAYSGRERVYSNASLLIQNVTQEDAGSYTLHIIKRRDGTGGVTGHFTFTLHLETPKPSISSSNLNPREAMEAVILTCDPATPAASYQWWMNGQSLPMTHRLQLSKTNRTLFIFGVTKYIAGPYECEIRNPVSASRSDPVTLNLLHGPDLPSIYPSFTYYRSGENLYLSCFAESNPRAQYSWTINGKFQLSGQKLSIPQITTKHSGLYACSVRNSATGKESSKSITVKVSDWILP

SEQ ID NO: 10996 - protein, 419 aa, Homo Sapiens
MGPLSAPPCTQRITWKGVLLTASLLNFWNPPTTAQVTIEAQPPKVSEGKDVLLLVHNLPQNLAGYIWYKGQMTYLYHYITSYVVDGQRIIYGPAYSGRERVYSNASLLIQNVTQEDAGSYTLHIIKRRDGTGGVTGHFTFTLHLETPKPSISSSNLNPREAMEAVILTCDPATPAASYQWWMNGQSLPMTHRLQLSKTNRTLFIFGVTKYIAGPYECEIRNPVSASRSDPVTLNLLPKLSKPYITINNLNPRENKDVLTFTCEPKSKNYTYIWWLNGQSLPVSPRVKRPIENRILILPNVTRNETGPYQCEIRDRYGGIRSDPVTLNVLYGPDLPSIYPSFTYYRSGENLYLSCFAESNPRAQYSWTINGKFQLSGQKLSIPQITTKHSGLYACSVRNSATGKESSKSITVKVSDWILP

SEQ ID NO: 10997 - protein, 326 aa, Homo Sapiens
MGPLSAPPCTQRITWKGVLLTASLLNFWNPPTTAQVTIEAQPPKVSEGKDVLLLVHNLPQNLAGYIWYKGQMTYLYHYITSYVVDGQRIIYGPAYSGRERVYSNASLLIQNVTQEDAGSYTLHIIKRRDGTGGVTGHFTFTLHPKLSKPYITINNLNPRENKDVLTFTCEPKSKNYTYIWWLNGQSLPVSPRVKRPIENRILILPNVTRNETGPYQCEIRDRYGGIRSDPVTLNVLYGPDLPSIYPSFTYYRSGENLYLSCFAESNPRAQYSWTINGKFQLSGQKLSIPQITTKHSGLYACSVRNSATGKESSKSITVKVSDWILP

SEQ ID NO: 10998 - protein, 52 aa, Homo Sapiens
MGPLSAPPCTQRITWKGVLLTGCSCPKPTGPSLYLVSQSILQDPMNVKYGTQ

SEQ ID NO: 10999 - protein, 40 aa, Homo Sapiens
MGPLSAPPCTQRITWKGVLLTGHSLDSALSLEVTGSSQSP

SEQ ID NO: 11000 - protein, 180 aa, Homo Sapiens
MGPLSAPPCTQRITWKGVLLTVETPKPSISSSNLNPREAMEAVILTCDPATPAASYQWWMNGQSLPMTHRLQLSKTNRTLFIFGVTKYIAGPYECEIRNPVSASRSDPVTLNLLHGPDLPSIYPSFTYYRSGENLYLSCFAESNPRAQYSWTINGKFQLSGQKLSIPQITTKHSGLYACS

SEQ ID NO: 11001 - protein, 292 aa, Homo Sapiens
MGPLSAPPCTQRITWKGVLLTVETPKPSISSSNLNPREAMEAVILTCDPATPAASYQWWMNGQSLPMTHRLQLSKTNRTLFIFGVTKYIAGPYECEIRNPVSASRSDPVTLNLLPKLSKPYITINNLNPRENKDVLTFTCEPKSKNYTYIWWLNGQSLPVSPRVKRPIENRILILPNVTRNETGPYQCEIRDRYGGIRSDPVTLNVLYGPDLPSIYPSFTYYRSGENLYLSCFAESNPRAQYSWTINGKFQLSGQKLSIPQITTKHSGLYACSVRNSATGKESSKSITVKVS

SEQ ID NO: 11002 - protein, 252 aa, Homo Sapiens
MKHCPQQETSTIGGKKKHPEGGDPENSHIYRSLPPVPASLLNFWNPPTTAQVTIEAQPPKVSEGKDVLLLVHNLPQNLAGYIWYKGQMTYLYHYITSYVVDGQRIIYGPAYSGRERVYSNASLLIQNVTQEDAGSYTLHIIKRRDGTGGVTGHFTFTLHLETPKPSISSSNLNPREAMEAVILTCDPATPAASYQWWMNGQSLPMTHRLQLSKTNRTLFIFGVTKYIAGPYECEIRNPVSASRSDPVTLNLL

SEQ ID NO: 11003 - protein, 78 aa, Homo Sapiens
MTYLYHYITSYVVDGQRIIYGPAYSGRERVYSNASLLIQNVTQEDAGSYTLHIIKRRDGTGGVTGHFTFTLHLETPKP

SEQ ID NO: 11004 - protein, 96 aa, Homo Sapiens
  misc_feature (1)..(1): Xaa can be any naturally occurring amino acid
XETPKPSISSSNLNPREAMEAVILTCDPATPAASYQWWMNGQSLPMTHRLQLSKTNRTLFIFGVTKYIAGPYECEIRNPVSASRSDPVTLNLLRSY

SEQ ID NO: 11005 - protein, 244 aa, Homo Sapiens
  misc_feature (1)..(1): Xaa can be any naturally occurring amino acid
XSLLNFWNPPTTAQVTIEAQPPKVSEGKDVLLLVHNLPQNLAGYIWYKGQMTYLYHYITSYVVDGQRIIYGPAYSGRERVYSNASLLIQNVTQEDAGSYTLHIIKRRDGTGGVTGHFTFTLHPKLSKPYITINNLNPRENKDVLTFTCEPKSKNYTYIWWLNGQSLPVSPRVKRPIENRILILPNVTRNETGPYQCEIRDRYGGIRSDPVTLNVLYGPDLPSIYPSFTYYRSGENLYLSCFAES

SEQ ID NO: 11006 - protein, 258 aa, Homo Sapiens
  misc_feature (1)..(1): Xaa can be any naturally occurring amino acid
XYIAGPYECEIRNPVSASRSDPVTLNLLPKLSKPYITINNLNPRENKDVLTFTCEPKSKNYTYIWWLNGQSLPVSPRVKRPIENRILILPNVTRNETGPYQCEIRDRYGGIRSDPVTLNVLYGPDLPSIYPSFTYYRSGENLYLSCFAESNPRAQYSWTINGKFQLSGQKLSIPQITTKHSGLYACSVRNSATGKESSKSITVKVSGHISNHWLYYQGFDWDVIFKNIDRMNQYELQAKSEVSLGLASYSQGFCKSLI

SEQ ID NO: 11007 - protein, 428 aa, Homo Sapiens
MGPLSAPPCTQHITWKGLLLTASLLNFWNLPITAQVTIEALPPKVSEGKDVLLLVHNLPQNLAGYIWYKGQLMDLYHYITSYVVDGQINIYGPAYTGRETVYSNASLLIQNVTREDAGSYTLHIIKRGDRTRGVTGYFTFNLYLETPKPSISSSNLNPREAMEAVILTCDPAASDTSYLWWMNGQSLPMTHRLQLSKTNRTLFIFGVTKYIAGPYECEIRNPVSASHSDPVTLNLLLKLPKPYITINNSKPRENKDVLAFTCEPKSENYTYIWWLNGQSLPVSPRVKRPIENRILILPSVTRNETGPYECEIRDRDGGMRSDPVTLNVLYGPDLPSIYPSFTYYRSGENLYLSCFAESNPPAEYFWTINGKFQQSGQKLSIPQITTKHRGLYTCSVRNSATGKESSKSMTVEVSAPSGIGRLPLLNPI

SEQ ID NO: 11008 - protein, 335 aa, Homo Sapiens
MGPLSAPPCTQHITWKGLLLTASLLNFWNLPITAQVTIEALPPKVSEGKDVLLLVHNLPQNLAGYIWYKGQLMDLYHYITSYVVDGQINIYGPAYTGRETVYSNASLLIQNVTREDAGSYTLHIIKRGDRTRGVTGYFTFNLYLKLPKPYITINNSKPRENKDVLAFTCEPKSENYTYIWWLNGQSLPVSPRVKRPIENRILILPSVTRNETGPYECEIRDRDGGMRSDPVTLNVLYGPDLPSIYPSFTYYRSGENLYLSCFAESNPPAEYFWTINGKFQQSGQKLSIPQITTKHRGLYTCSVRNSATGKESSKSMTVEVSAPSGIGRLPLLNPI

SEQ ID NO: 11009 - protein, 335 aa, Homo Sapiens; identical to SEQ ID NO: 11008

SEQ ID NO: 11010 - protein, 333 aa, Homo Sapiens
MGPLSAPPCTQHITWKGLLLTASLLNFWNLPITAQVTIEALPPKVSEGKDVLLLVHNLPQNLAGYIWYKGQLMDLYHYITSYVVDGQINIYGPAYTGRETVYSNASLLIQNVTREDAGSYTLHIIKRGDRTRGVTGYFTFNLYLKLPKPYITINNSKPRENKDVLAFTCEPKSENYTYIWWLNGQSLPVSPRVKRPIENRILILPSVTRNETGPYECEIRDRDGGMRSDPVTLNVLYGPDLPSIYPSFTYYRSGENLYLSCFAESNPPAEYFWTINGKFQQSGQKLSIPQITTKHRGLYTCSVRNSATGKESSKSMTVEVSGKWIPASLAIGF

SEQ ID NO: 11011 - protein, 335 aa, Homo Sapiens; identical to SEQ ID NO: 11008

SEQ ID NO: 11012 - protein, 157 aa, Homo Sapiens
MGPLSAPPCTQHITWKGLLLTASLLNFWNLPITAQVTIEALPPKVSEGKDVLLLVHNLPQNLAGYIWYKGQLMDLYHYITSYVVDGQINIYGPAYTGRETVYSNASLLIQNVTREDAGSYTLHIIKRGDRTRGVTGYFTFNLYPPSGIGRLPLLNPI

SEQ ID NO: 11013 - protein, 158 aa, Homo Sapiens [sequence omitted]

SEQ ID NO: 11014 - protein, 331 aa, Homo Sapiens
MGPLSAPPCTQHITWKGLLLTASLLNFWNLPTTAQVIIEAKPPKVSEGKDVLLLVHNLPQNLTGYIWYKGQMTDLYHYITSYVVHGQIIYGPAYSGRETVYSNASLLIQNVTQEDAGSYTLHIIKRGDGTGGVTGYFTVTLYSETPKPSISSSNLNPREVMEAVRLICDPETPDASYLWLLNGQNLPMTHRLQLSKTNRTLYLFGVTKYIAGPYECEIRNPVSASRSDPVTLNLLHGPDLPRIYPSFTYYRSGENLDLSCFADSNPPAEYSWTINGKFQLSGQKLFIPQITTNHSGLYACSVRNSATGKEISKSMIVKVSGPCHGNQTESH

SEQ ID NO: 11015 - protein, 424 aa, Homo Sapiens
MGPLSAPPCTQHITWKGLLLTASLLNFWNLPTTAQVIIEAKPPKVSEGKDVLLLVHNLPQNLTGYIWYKGQMTDLYHYITSYVVHGQIIYGPAYSGRETVYSNASLLIQNVTQEDAGSYTLHIIKRGDGTGGVTGYFTVTLYSETPKPSISSSNLNPREVMEAVRLICDPETPDASYLWLLNGQNLPMTHRLQLSKTNRTLYLFGVTKYIAGPYECEIRNPVSASRSDPVTLNLLPKLPMPYITINNLNPREKKDVLAFTCEPKSRNYTYIWWLNGQSLPVSPRVKRPIENRILILPSVTRNETGPYQCEIRDRYGGIRSNPVTLNVLYGPDLPRIYPSFTYYRSGENLDLSCFADSNPPAEYSWTINGKFQLSGQKLFIPQITTNHSGLYACSVRNSATGKEISKSMIVKVSGPCHGNQTESH

SEQ ID NO: 11016 - protein, 435 aa, Homo Sapiens
MGPLSAPPCTQHITWKGLLLTASLLNFWNLPTTAQVIIEAKPPKVSEGKDVLLLVHNLPQNLTGYIWYKGQMTDLYHYITSYVVHGQIIYGPAYSGRETVYSNASLLIQNVTQEDAGSYTLHIIKRGDGTGGVTGYFTVTLYSETPKPSISSSNLNPREVMEAVRLICDPETPDASYLWLLNGQNLPMTHRLQLSKTNRTLYLFGVTKYIAGPYECEIRNPVSASRSDPVTLNLLPKLPMPYITINNLNPREKKDVLAFTCEPKSRNYTYIWWLNGQSLPVSPRVKRPIENRILILPSVTRNETGPYQCEIRDRYGGIRSNPVTLNVLYGPDLPRIYPSFTYYRSGENLDLSCFADSNPPAEYSWTINGKFQLSGQKLFIPQITTNHSGLYACSVRNSATGKEISKSMIVKVSETASPQVTYAGPNTWFQEILLL

SEQ ID NO: 11017 - protein, 73 aa, Homo Sapiens
MTDLYHYITSYVVHGQIIYGPAYSGRETVYSNASLLIQNVTQEDAGSYTLHIIKRGDGTGGVTGYFTVTLYCE

SEQ ID NO: 11018 - protein, 81 aa, Homo Sapiens
  misc_feature (1)..(1): Xaa can be any naturally occurring amino acid
XEAVRLICDPETPDASYLWLLNGQNLPMTHRLQLSKTNRTLYLFGVTKYIAGPYECEIRNPVSASRSDPVTLNLLRGRCQL

SEQ ID NO: 11019 - protein, 419 aa, Homo Sapiens
MGPLSAPPCTQHITWKGLLLTASLLNFWNPPTTAQVTIEAQPPKVSEGKDVLLLVHNLPQNLTGYIWYKGQIRDLYHYVTSYIVDGQIIKYGPAYSGRETVYSNASLLIQNVTQEDTGSYTLHIIKRGDGTGGVTGRFTFTLYLETPKPSISSSNFNPREATEAVILTCDPETPDASYLWWMNGQSLPMTHSLQLSETNRTLYLFGVTNYTAGPYECEIRNPVSASRSDPVTLNLLPKLPKPYITINNLNPRENKDVSTFTCEPKSENYTYIWWLNGQSLPVSPRVKRRIENRILILPSVTRNETGPYQCEIRDRYGGIRSDPVTLNVLYGPDLPRIYPSFTYYHSGQNLYLSCFADSNPPAQYSWTINGKFQLSGQKLSIPQITTKHSGLYACSVRNSATGKESSKSVTVRVSDWTLP

SEQ ID NO: 11020 - protein, 426 aa, Homo Sapiens
MGPLSAPPCTQHITWKGLLLTASLLNFWNPPTTAQVTIEAQPPKVSEGKDVLLLVHNLPQNLTGYIWYKGQIRDLYHYVTSYIVDGQIIKYGPAYSGRETVYSNASLLIQNVTQEDTGSYTLHIIKRGDGTGGVTGRFTFTLYLETPKPSISSSNFNPREATEAVILTCDPETPDASYLWWMNGQSLPMTHSLQLSETNRTLYLFGVTNYTAGPYECEIRNPVSASRSDPVTLNLLPKLPKPYITINNLNPRENKDVSTFTCEPKSENYTYIWWLNGQSLPVSPRVKRRIENRILILPSVTRNETGPYQCEIRDRYGGIRSDPVTLNVLYGPDLPRIYPSFTYYHSGQNLYLSCFADSNPPAQYSWTINGKFQLSGQKLSIPQITTKHSGLYACSVRNSATGKESSKSVTVRVSGKWIPASLAIGF

SEQ ID NO: 11021 - protein, 297 aa, Homo Sapiens
MGPLSAPPCTQHITWKGLLLTVETPKPSISSSNFNPREATEAVILTCDPETPDASYLWWMNGQSLPMTHSLQLSETNRTLYLFGVTNYTAGPYECEIRNPVSASRSDPVTLNLLPKLPKPYITINNLNPRENKDVSTFTCEPKSENYTYIWWLNGQSLPVSPRVKRRIENRILILPSVTRNETGPYQCEIRDRYGGIRSDPVTLNVLYGPDLPRIYPSFTYYHSGQNLYLSCFADSNPPAQYSWTINGKFQLSGQKLSIPQITTKHSGLYACSVRNSATGKESSKSVTVRVSDWTLP

SEQ ID NO: 11022 - protein, 426 aa, Homo Sapiens
MGLLSAPPCTQRITWKGLLLTASLLNFWNPPTTAQVTIEAQPTKVSEGKDVLLLVHNLPQNLTGYIWYKGQIRDLYHYITSYVVDGQIIIYGPAYSGRETIYSNASLLIQNVTQEDAGSYTLHIIMGGDENRGVTGHFTFTLYLETPKPSISSSKLNPREAMEAVSLTCDPETPDASYLWWMNGQSLPMSHRLQLSETNRTLFLLGVTKYTAGPYECEIRNPVSASRSDPFTLNLLPKLPKPYITINNLKPRENKDVLNFTCEPKSENYTYIWWLNGQSLPVSPRVKRPIENRILILPSVTRNETGPYQCEIRDQYGGIRSYPVTLNVLYGPDLPRIYPSFTYYRSGEVLYLSCSADSNPPAQYSWTINGKFQLSGQKLFIPQITTKHSGLYACSVRNSATGKESSKSMTVKVSGKRIPVSLAIGI

SEQ ID NO: 11023 - protein, 419 aa, Homo Sapiens
MGLLSAPPCTQRITWKGLLLTASLLNFWNPPTTAQVTIEAQPTKVSEGKDVLLLVHNLPQNLTGYIWYKGQIRDLYHYITSYVVDGQIIIYGPAYSGRETIYSNASLLIQNVTQEDAGSYTLHIIMGGDENRGVTGHFTFTLYLETPKPSISSSKLNPREAMEAVSLTCDPETPDASYLWWMNGQSLPMSHRLQLSETNRTLFLLGVTKYTAGPYECEIRNPVSASRSDPFTLNLLPKLPKPYITINNLKPRENKDVLNFTCEPKSENYTYIWWLNGQSLPVSPRVKRPIENRILILPSVTRNETGPYQCEIRDQYGGIRSYPVTLNVLYGPDLPRIYPSFTYYRSGEVLYLSCSADSNPPAQYSWTINGKFQLSGQKLFIPQITTKHSGLYACSVRNSATGKESSKSMTVKVSDWTLP

SEQ ID NO: 11024 - protein, 40 aa, Homo Sapiens
MGLLSAPPCTQRITWKGLLLTGHSLDSALSLEVTGSSQPL

SEQ ID NO: 11025 - protein, 297 aa, Homo Sapiens
MGLLSAPPCTQRITWKGLLLTVETPKPSISSSKLNPREAMEAVSLTCDPETPDASYLWWMNGQSLPMSHRLQLSETNRTLFLLGVTKYTAGPYECEIRNPVSASRSDPFTLNLLPKLPKPYITINNLKPRENKDVLNFTCEPKSENYTYIWWLNGQSLPVSPRVKRPIENRILILPSVTRNETGPYQCEIRDQYGGIRSYPVTLNVLYGPDLPRIYPSFTYYRSGEVLYLSCSADSNPPAQYSWTINGKFQLSGQKLFIPQITTKHSGLYACSVRNSATGKESSKSMTVKVSDWTLP

SEQ ID NO: 11026 - protein, 326 aa, Homo Sapiens
MGPLSAPPCTQHIKWKGVLLTASLLNFWNPPTTAQVTIEAQPTKVSEGKDVLLLVHNLPQNLTGYIWYKGQIRDLYHYITSYVVDGQIIIYGPAYSGRETIYSNASLLIQNVTQEDAGSYTLHIIMGGDENRGVTGHFTFTLYPKLPKPYITINNLKPRENKDVLNFTCEPKSENYTYIWWLNGQSLPVSPRVKRPIENRILILPSVTRNETGPYQCEIRDQYGGIRSYPVTLNVLYGPDLPRIYPSFTYYRSGEVLYLSCSADSNPPAQYSWTINGKFQLSGQKLFIPQITTKHSGLYACSVRNSATGKESSKSMTVKVSDWTLP

SEQ ID NO: 11027 - protein, 402 aa, Homo Sapiens
MGPLPAPSCTQRITWKGLLLTASLLNFWNPPTTAEVTIEAQPPKVSEGKDVLLLVHNLPQNLPGYFWYKGEMTDLYHYIISYIVDGKIIIYGPAYSGRETVYSNASLLIQNVTRKDAGTYTLHIIKRGDETREEIRHFTFTLYLETPKPYISSSNLNPREAMEAVRLICDPETLDASYLWWMNGQSLPVTHRLQLSKTNRTLYLFGVTKYIAGPYECEIRNPVSASRSDPVTLNLLHGPDLPRIYPSFTYYRSGENLDLSCFTESNPPAEYFWTINGKFQQSGQKLFIPQITRNHSGLYACSVHNSATGKEISKSMTVKVSGKWIPASLAVGFYVESIWLSEKSQENIFIPSLCPMGTSKSQILLLNPPNLSLQTLFSLFFCFLMADLVSGLKKVGRGLYQP

SEQ ID NO: 11028 - protein, 333 aa, Homo Sapiens
MGPLPAPSCTQRITWKGLLLTASLLNFWNPPTTAEVTIEAQPPKVSEGKDVLLLVHNLPQNLPGYFWYKGEMTDLYHYIISYIVDGKIIIYGPAYSGRETVYSNASLLIQNVTRKDAGTYTLHIIKRGDETREEIRHFTFTLYLETPKPYISSSNLNPREAMEAVRLICDPETLDASYLWWMNGQSLPVTHRLQLSKTNRTLYLFGVTKYIAGPYECEIRNPVSASRSDPVTLNLLHGPDLPRIYPSFTYYRSGENLDLSCFTESNPPAEYFWTINGKFQQSGQKLFIPQITRNHSGLYACSVHNSATGKEISKSMTVKVSGPCHGDLTESQS

SEQ ID NO: 11029 - protein, 426 aa, Homo Sapiens
MGPLPAPSCTQRITWKGLLLTASLLNFWNPPTTAEVTIEAQPPKVSEGKDVLLLVHNLPQNLPGYFWYKGEMTDLYHYIISYIVDGKIIIYGPAYSGRETVYSNASLLIQNVTRKDAGTYTLHIIKRGDETREEIRHFTFTLYLETPKPYISSSNLNPREAMEAVRLICDPETLDASYLWWMNGQSLPVTHRLQLSKTNRTLYLFGVTKYIAGPYECEIRNPVSASRSDPVTLNLLPKLPIPYITINNLNPRENKDVLAFTCEPKSENYTYIWWLNGQSLPVSPGVKRPIENRILILPSVTRNETGPYQCEIRDRYGGLRSNPVILNVLYGPDLPRIYPSFTYYRSGENLDLSCFTESNPPAEYFWTINGKFQQSGQKLFIPQITRNHSGLYACSVHNSATGKEISKSMTVKVSGPCHGDLTESQS

SEQ ID NO: 11030 - protein, 419 aa, Homo Sapiens
MGPLPAPSCTQRITWKGLLLTASLLNFWNPPTTAEVTIEAQPPKVSEGKDVLLLVHNLPQNLPGYFWYKGEMTDLYHYIISYIVDGKIIIYGPAYSGRETVYSNASLLIQNVTRKDAGTYTLHIIKRGDETREEIRHFTFTLYLETPKPYISSSNLNPREAMEAVRLICDPETLDASYLWWMNGQSLPVTHRLQLSKTNRTLYLFGVTKYIAGPYECEIRNPVSASRSDPVTLNLLPKLPIPYITINNLNPRENKDVLAFTCEPKSENYTYIWWLNGQSLPVSPGVKRPIENRILILPSVTRNETGPYQCEIRDRYGGLRSNPVILNVLYGPDLPRIYPSFTYYRSGENLDLSCFTESNPPAEYFWTINGKFQQSGQKLFIPQITRNHSGLYACSVHNSATGKEISKSMTVKVSDWILP

SEQ ID NO: 11031 - protein, 326 aa, Homo Sapiens
MGPLPAPSCTQRITWKGLLLTASLLNFWNPPTTAEVTIEAQPPKVSEGKDVLLLVHNLPQNLPGYFWYKGEMTDLYHYIISYIVDGKIIIYGPAYSGRETVYSNASLLIQNVTRKDAGTYTLHIIKRGDETREEIRHFTFTLYSKLPIPYITINNLNPRENKDVLAFTCEPKSENYTYIWWLNGQSLPVSPGVKRPIENRILILPSVTRNETGPYQCEIRDRYGGLRSNPVILNVLYGPDLPRIYPSFTYYRSGENLDLSCFTESNPPAEYFWTINGKFQQSGQKLFIPQITRNHSGLYACSVHNSATGKEISKSMTVKVSDWILP

SEQ ID NO: 11032 - protein, 333 aa, Homo Sapiens
MGPLPAPSCTQRITWKGLLLTASLLNFWNPPTTAEVTIEAQPPKVSEGKDVLLLVHNLPQNLPGYFWYKGEMTDLYHYIISYIVDGKIIIYGPAYSGRETVYSNASLLIQNVTRKDAGTYTLHIIKRGDETREEIRHFTFTLYSKLPIPYITINNLNPRENKDVLAFTCEPKSENYTYIWWLNGQSLPVSPGVKRPIENRILILPSVTRNETGPYQCEIRDRYGGLRSNPVILNVLYGPDLPRIYPSFTYYRSGENLDLSCFTESNPPAEYFWTINGKFQQSGQKLFIPQITRNHSGLYACSVHNSATGKEISKSMTVKVSGPCHGDLTESQS

SEQ ID NO: 11033 - protein, 309 aa, Homo Sapiens
MGPLPAPSCTQRITWKGLLLTASLLNFWNPPTTAEVTIEAQPPKVSEGKDVLLLVHNLPQNLPGYFWYKGEMTDLYHYIISYIVDGKIIIYGPAYSGRETVYSNASLLIQNVTRKDAGTYTLHIIKRGDETREEIRHFTFTLYYGPDLPRIYPSFTYYRSGENLDLSCFTESNPPAEYFWTINGKFQQSGQKLFIPQITRNHSGLYACSVHNSATGKEISKSMTVKVSGKWIPASLAVGFYVESIWLSEKSQENIFIPSLCPMGTSKSQILLLNPPNLSLQTLFSLFFCFLMADLVSGLKKVGRGLYQP

SEQ ID NO: 11034 - protein, 240 aa, Homo Sapiens
MGPLPAPSCTQRITWKGLLLTASLLNFWNPPTTAEVTIEAQPPKVSEGKDVLLLVHNLPQNLPGYFWYKGEMTDLYHYIISYIVDGKIIIYGPAYSGRETVYSNASLLIQNVTRKDAGTYTLHIIKRGDETREEIRHFTFTLYYGPDLPRIYPSFTYYRSGENLDLSCFTESNPPAEYFWTINGKFQQSGQKLFIPQITRNHSGLYACSVHNSATGKEISKSMTVKVSGPCHGDLTESQS

SEQ ID NO: 11035 - protein, 953 aa, Homo Sapiens [sequence omitted]

SEQ ID NO: 11036 - protein, 953 aa, Homo Sapiens
MITSAAGIISLLDEDEPQLKEFALHKLNAVVNDFWAEISESVDKIEVLYEDEGFRSRQFAALVASKVFYHLGAFEESLNYALGAGDLFNVNDNSEYVETIIAKCIDHYTKQCVENADLPEGEKKPIDQRLEGIVNKMFQRCLDDHKYKQAIGIALETRRLDVFEKTILESNDVPGMLAYSLKLCMSLMQNKQFRNKVLRVLVKIYMNLEKPDFINVCQCLIFLDDPQAVSDILEKLVKEDNLLMAYQICFDLYESASQQFLSSVIQNLRTVGTPIASVPGSTNTGTVPGSEKDSDSMETEEKTSSAFVGKTPEASPEPKDQTLKMIKILSGEMAIELHLQFLIRNNNTDLMILKNTKDAVRNSVCHTATVIANSFMHCGTTSDQFLRDNLEWLARATNWAKFTATASLGVIHKGHEKEALQLMATYLPKDTSPGSAYQEGGGLYALGLIHANHGGDIIDYLLNQLKNASNDIVRHGGSLGLGLAAMGTARQDVYDLLKTNLYQDDAVTGEAAGLALGLVMLGSKNAQAIEDMVGYAQETQHEKILRGLAVGIALVMYGRMEEADALIESLCRDKDPILRRSGMYTVAMAYCGSGNNKAIRRLLHVAVSDVNDDVRRAAVESLGFILFRTPEQCPSVVSLLSESYNPHVRYGAAMALGICCAGTGNKEAINLLEPMTNDPVNYVRQGALIASALIMIQQTEITCPKVNQFRQLYSKVINDKHDDVMAKFGAILAQGILDAGGHNVTISLQSRTGHTHMPSVVGVLVFTQFWFWFPLSHFLSLAYTPTCVIGLNKDLKMPKVQYKSNCKPSTFAYPAPLEVPKEKEKEKVSTAVLSITAKAKKKEKEKEKKEEEKMEVDEAEKKEEKEKKKEPEPNFQLLDNPARVMPAQLKVLTMPETCRYQPFKPLSIGGIIILKDTSEDIEELVEPVAAHGPKIEEEEQEPEPPEPFEYIDD

SEQ ID NO: 11037 - protein, 922 aa, Homo Sapiens
MITSAAGIISLLDEDEPQLKEFALHKLNAVVNDFWAEISESVDKIEVLYEDEGFRSRQFAALVASKVFYHLGAFEESLNYALGAGDLFNVNDNSEYVETIIAKCIDHYTKQCVENADLPEGEKKPIDQRLEGIVNKMFQRCLDDHKYKQAIGIALETRRLDVFEKTILESNDVPGMLAYSLKLCMSLMQNKQFRNKVLRVLVKIYMNLEKPDFINVCQCLIFLDDPQAVSDILEKLVKEDNLLMAYQICFDLYESASQQFLSSVIQNLRTVGTPIASVPGSTNTGTVPGSEKDSDSMETEEKTSSAFVGKTPEASPEPKDQTLKMIKILSGEMAIELHLQFLIRNNNTDLMILKNTKDAVRNSVCHTATVIANSFMHCGTTSDQFLRDNLEWLARATNWAKFTATASLGVIHKGHEKEALQLMATYLPKDTSPGSAYQEGGGLYALGLIHANHGGDIIDYLLNQLKNASNDIVRHGGSLGLGLAAMGTARQDVYDLLKTNLYQDDAVTGEAAGLALGLVMLGSKNAQAIEDMVGYAQETQHEKILRGLAVGIALVMYGRMEEADALIESLCRDKDPILRRSGMYTVAMAYCGSGNNKAIRRLLHVAVSDVNDDVRRAAVESLGFILFRTPEQCPSVVSLLSESYNPHVRYGAAMALGICCAGTGNKEAINLLEPMTNDPVNYVRQGALIASALIMIQQTEITCPKVNQFRQLYSKVINDKHDDVMAKFGAILAQGILDAGGHNVTISLQSRTGHTHMPSVVGVLVFTQFWFWFPLSHFLSLAYTPTCVIGLNKDLKVSTAVLSITAKAKKKEKEKEKKEEEKMEVDEAEKKEEKEKKKEPEPNFQLLDNPARVMPAQLKVLTMPETCRYQPFKPLSIGGIIILKDTSEDIEELVEPVAAHGPKIEEEEQEPEPPEPFEYIDD

SEQ ID NO: 11038 - protein, 922 aa, Homo Sapiens; identical to SEQ ID NO: 11037

SEQ ID NO: 11039 - protein, 203 aa, Homo Sapiens
MITSAAGIISLLDEDEPQLKEFALHKLNAVVNDFWAEISESVDKIEVLYEDEGFRSRQFAALVASKVFYHLGAFEESLNYALGAGDLFNVNDNSEYVETIIGNYRLSAKCIDHYTKQCVENADLPEGEKKPIDQRLEGIVNKMFQRCLDDHKYKQAIGIALETRRLDVFEKTILESNDVPGMLAYSLKLCMSLMQNKQFRNKV

SEQ ID NO: 11040 - protein, 48 aa, Homo Sapiens
MITSAAGIISLLDEDEPQLKEFALHKLNAVVNDFWAEISESVDKIKMH

SEQ ID NO: 11041 - protein, 164 aa, Homo Sapiens
  misc_feature (1)..(1): Xaa can be any naturally occurring amino acid
XAKCIDHYTKQCVENADLPEGEKKPIDQRLEGIVNKMFQRCLDDHKYKQAIGIALETRRLDVFEKTILESNDVPGMLAYSLKLCMSLMQNKQFRNKVLRVLVKIYMNLEKPDFINVCQNLRTVGTPIASVPGSTNTGTVPGSEKDSDSMETEEKTSSAFVGKTP

SEQ ID NO: 11042 - protein, 192 aa, Homo Sapiens
  misc_feature (1)..(1): Xaa can be any naturally occurring amino acid
XGEAAGLALGLVMLGSKNAQAIEDMVGYAQETQHEKILRGLAVGIALVMYGRMEEADALIESLCRDKDPILRRSGMYTVAMAYCGSGNNKAIRRLLHVAVSDVNDDVRRAAVESLGFILFRTPEQCPSVVSLLSESYNPHVRYGAAMALGICCAGTGNKVKPTANGVSSFLAPDCFPSPQNLCNSCKNTSAM

SEQ ID NO: 11043 - protein, 136 aa, Homo Sapiens
MILNWKLLGILVLCLHTRGISGSEGHPSHPPAEDREEAGSPTLPQGPPVPGDPWPGAPPLFEDPPPTRPSRPWRDLPETGVWLPEPPRTDPPQPPRPDDPWPAGPQPPENPWPPAPEVDNRPQEEPDLDPPREEYR

SEQ ID NO: 11044 - protein, 164 aa, Homo Sapiens
MAVGKFLLGSLLLLSLQLGQGWGPDARGVPVADGEFSSEQVAKAGGTWLGKDFQGPSVTSQLSPALTLLTVSALPSHRHPPPPCPPAPSPVWSMPAVEPDPVRGRARPGLRLRGEGHLPLLRRQLPPWCPHPAWPGAGPAAGPGPSPRRALLPAHSLHRRGLPR

SEQ ID NO: 11045 - protein, 156 aa, Homo Sapiens
MAVGKFLLGSLLLLSLQLGQGWGPDARGVPVADGEFSSEQVAKAGGTWLGTHRPLARLRRALSGPCQLWSLTLSVAELGLGYASEEKVIFRYCAGSCPRGARTQHGLALARLQGQGRAHGGPCCRPTRYTDVAFLDDRHRWQRLPQLSAAACGCGG

SEQ ID NO: 11046 - protein, 48 aa, Homo Sapiens
MATHHTLWMGLALLGVLGDLQAAPEAQVSVQPNFQQDKFLGRWFSAGL

SEQ ID NO: 11047 - protein, 190 aa, Homo Sapiens
MATHHTLWMGLALLGVLGDLQAAPEAQVSVQPNFQQDKFLGRWFSAGLASNSSWLREKKAALSMCKSVVAPATDGGLNLTSTFLRKNQCETRTMLLQPAGSLGSYSYRSPHWGSTYSVSVVETDYDQYALLYSQGSKGPGEDFRMATLYSRTQTPRAELKEKFTAFCKAQGFTEDTIVFLPQTDKCMTEQ

SEQ ID NO: 11048 - protein, 195 aa, Homo Sapiens
MATHHTLWMGLALLGVLGDLQAAPEAQVSVQPNFQQDKFLGRWFSAGLASNSSWLREKKAALSMCKSVVAPATDGGLNLTSTFLRKNQCETRTMLLQPAGSLGSYSYRSPREWGLHRPPGPSLGATLAGTTLGQPPAAEIHGVGDWGSTYSVSVVETDYDQYALLYSQGSKGPGEDFRMATLYSRTQTPRAELKE

SEQ ID NO: 11049 - protein, 124 aa, Homo Sapiens
VVAPATDGGLNLTSTFLRKNQCETRTMLLQPAGSLGSYSYRSPHWGSTYSVSVVETDYDQYALLYSQGSKGPGEDFRMATLYSRTQTPRAELKEKFTAFCKAQGFTEDTIVFLPQTAPGFFLGR

SEQ ID NO: 11050 - protein, 62 aa, Homo Sapiens
  misc_feature (1)..(1): Xaa can be any naturally occurring amino acid
XGYHCLPAPNRAQGEVGGDGGSVQFGGSVKTSSALREEQEAQWENWPKSGVLTTAPGFFLGR

SEQ ID NO: 11051 - protein, 386 aa, Homo Sapiens [sequence omitted]

SEQ ID NO: 11052 - protein, 296 aa, Homo Sapiens
MADSCRNLTYVRGSVGPATSTLMFVAGVVGNGLALGILSARRPARPSAFAVLVTGLAATDLLGTSFLSPAVFVAYARNSSLLGLARGGPALCDAFAFAMTFFGLASMLILFAMAVERCLALSHPYLYAQLDGPRCARLALPAIYAFCVLFCALPLLGLGQHQQYCPGSWCFLRMRWAQPGGAAFSLAYAGLVALLVAAIFLCNGSVTLSLCRMYRQQKRHQGSLGPRPRTGEDEVDHLILLALMTVVMAVCSLPLTHVERPRQDRMRWLTPVIPALWEAEAGGSFEVRSSRPVWPT

SEQ ID NO: 11053 - protein, 115 aa, Homo Sapiens
MGDLLAFRFYAFNPILDPWVFILFRKAVFQRLKLWVCCLCLGPAHGDSQTPLSQLASGRRDPRAPSAPVGKEGSCVPLSAWGEGQVEPLPPTQQSSGSAVGTSSKAEASVACSLC

SEQ ID NO: 11054 - protein, 143 aa, Homo Sapiens
MTVVMAVCSLPLTIRCFTQAVAPDSSSEMGDLLAFRFYAFNPILDPWVFILFRKAVFQRLKLWVCCLCLGPAHGDSQTPLSQLASGRRDPRAPSAPVGKEGSCVPLSAWGEGQVEPLPPTQQSSGSAVGTSSKAEASVACSLC

SEQ ID NO: 11055 - protein, 174 aa, Homo Sapiens
MYRQQKRHQGSLGPRPRTGEDEVDHLILLALMTVVMAVCSLPLTIRCFTQAVAPDSSSEMGDLLAFRFYAFNPILDPWVFILFRKAVFQRLKLWVCCLCLGPAHGDSQTPLSQLASGRRDPRAPSAPVGKEGSCVPLSAWGEGQVEPLPPTQQSSGSAVGTSSKAEASVACSLC

SEQ ID NO: 11056 - protein, 490 aa, Homo Sapiens
MLMRLVLTVRSNLIPSPPTYNSAHDYISWESFSNVSYYTRILPSVPKDCPTPMGTKGKKQLPDAQLLARRFLLRRKFIPDPQGTNLMFAFFAQHFTHQFFKTSGKMGPGFTKALGHGVDLGHIYGDNLERQYQLRLFKDGKLKYQVLDGEMYPPSVEEAPVLMHYPRGIPPQSQMAVGQEVFGLLPGLMLYATLWLREHNRVCDLLKAEHPTWGDEQLFQTTRLILIGETIKIVIEEYVQQLSGYFLQLKFDPELLFGVQFQYRNRIAMEFNHLYHWHPLMPDSFKVGSQEYSYEQFLFNTSMLVDYGVEALVDAFSRQIAGRIGGGRNMDHHILHVAVDVIRESREMRLQPFNEYRKRFGMKPYTSFQELVGEKEMAAELEELYGDIDALEFYPGLLLEKCHPNSIFGESMIEIGAPFSLKGLLGNPICSPEYWKPSTFGGEVGFNIVKTATLKKLVCLNTKTCPYVSFRVPDASQDDGPAVERPSTEL

SEQ ID NO: 11057 - protein, 402 aa, Homo Sapiens
MLMRLVLTVRSNLIPSPPTYNSAHDYISWESFSNVSYYTRILPSVPKDCPTPMGTKGKKQLPDAQLLARRFLLRRKFIPDPQGTNLMFAFFAQHFTHQFFKTSGKMGPGFTKALGHGVDLGHIYGDNLERQYQLRLFKDGKLKYQVLDGEMYPPSVEEAPVLMHYPRGIPPQSQMAVGQEVFGLLPGLMLYATLWLREHNRVCDLLKAEHPTWGDEQLFQTTRLILIGETIKIVIEEYVQQLSGYFLQLKFDPELLFGVQFQYRNRIAMEFNHLYHWHPLMPDSFKIGGGRNMDHHILHVAVDVIRESREMRLQPFNEYRKRFGMKPYTSFQELVGEKEMAAELEELYGDIDALEFYPGLLLEKCHPNSIFGESMIEIGAPFSLKGLLGNPICSPEYWKPST

SEQ ID NO: 11058 - protein, 537 aa, Homo Sapiens
MRKPRLMNPCCYYPCQHQGICVRFGLDRYQCDCTRTGYSGPNCTIPGLWTWLRNSLRPSPSFTHFLLTHGRWFWEFVNATFIREMLMRLVLTVRSNLIPSPPTYNSAHDYISWESFSNVSYYTRILPSVPKDCPTPMGTKGKKQLPDAQLLARRFLLRRKFIPDPQGTNLMFAFFAQHFTHQFFKTSGKMGPGFTKALGHGVDLGHIYGDNLERQYQLRLFKDGKLKYQVLDGEMYPPSVEEAPVLMHYPRGIPPQSQMAVGQEVFGLLPGLMLYATLWLREHNRVCDLLKAEHPTWGDEQLFQTTRLILIGETIKIVIEEYVQQLSGYFLQLKFDPELLFGVQFQYRNRIAMEFNHLYHWHPLMPDSFKIGGGRNMDHHILHVAVDVIRESREMRLQPFNEYRKRFGMKPYTSFQELVGEKEMAAELEELYGDIDALEFYPGLLLEKCHPNSIFGESMIEIGAPFSLKGLLGNPICSPEYWKPSTFGGEVGFNIVKTATLKKLVCLNTKTCPYVSFRVPDASQDDGPAVERPSTEL

SEQ ID NO: 11059 - protein, 172 aa, Homo Sapiens
MSRSLLLWFLLFLLLLPPLPVLLADPGAPTPAGLWTWLRNSLRPSPSFTHFLLTHGRWFWEFVNATFIREMLMRLVLTVRSNLIPSPPTYNSAHDYISWESFSNFFKTSGKMGPGFTKALGHGVDLGHIYGDNLERQYQLRLFKDGKLKYQVLDGEMYPPSVEEAPVLMHYP

SEQ ID NO: 11060 - protein, 41 aa, Homo Sapiens
MSRSLLLWFLLFLLLLPPLPVLLADPGAPTPAPGHLCPLRP

SEQ ID NO: 11061 - protein, 551 aa, Homo Sapiens
MSRSLLLWFLLFLLLLPPLPVLLADPGAPTPVNPCCYYPCQHQGICVRFGLDRYQCDCTRTGYSGPNCTIPGLWTWLRNSLRPSPSFTHFLLTHGRWFWEFVNATFIREMLMRLVLTGKKQLPDAQLLARRFLLRRKFIPDPQGTNLMFAFFAQHFTHQFFKTSGKMGPGFTKALGHGVDLGHIYGDNLERQYQLRLFKDGKLKYQVLDGEMYPPSVEEAPVLMHYPRGIPPQSQMAVGQEVFGLLPGLMLYATLWLREHNRVCDLLKAEHPTWGDEQLFQTTRLILIGETIKIVIEEYVQQLSGYFLQLKFDPELLFGVQFQYRNRIAMEFNHLYHWHPLMPDSFKVGSQEYSYEQFLFNTSMLVDYGVEALVDAFSRQIAGRIGGGRNMDHHILHVAVDVIRESREMRLQPFNEYRKRFGMKPYTSFQELVGEKEMAAELEELYGDIDALEFYPGLLLEKCHPNSIFGESMIEIGAPFSLKGLLGNPICSPEYWKPSTFGGEVGFNIVKTATLKKLVCLNTKTCPYVSFRVPDASQDDGPAVERPSTEL

SEQ ID NO: 11062 - protein, 562 aa, Homo Sapiens
MSRSLLLWFLLFLLLLPPLPVLLADPGAPTPVNPCCYYPCQHQGICVRFGLDRYQCDCTRTGYSGPNCTIPGLWTWLRNSLRPSPSFTHFLLTHGRWFWEFVNATFIREMLMRLVLTVRSNLIPSPPTYNSAHDYISWESFSNVSYYTRILPSVPKDCPTPMGTKGKKQLPDAQLLARRFLLRRKFIPDPQGTNLMFAFFAQHFTHQFFKTSGKMGPGFTKALGHGVDLGHIYGDNLERQYQLRLFKDGKLKYQVLDGEMYPPSVEEAPVLMHYPRGIPPQSQMAVGQEVFGLLPGLMLYATLWLREHNRVCDLLKAEHPTWGDEQLFQTTRLILIGETIKIVIEEYVQQLSGYFLQLKFDPELLFGVQFQYRNRIAMEFNHLYHWHPLMPDSFKIGGGRNMDHHILHVAVDVIRESREMRLQPFNEYRKRFGMKPYTSFQELVGEKEMAAELEELYGDIDALEFYPGLLLEKCHPNSIFGESMIEIGAPFSLKGLLGNPICSPEYWKPSTFGGEVGFNIVKTATLKKLVCLNTKTCPYVSFRVPDASQDDGPAVERPSTEL

SEQ ID NO: 11063 - protein, 599 aa, Homo Sapiens
MSRSLLLWFLLFLLLLPPLPVLLADPGAPTPVNPCCYYPCQHQGICVRFGLDRYQCDCTRTGYSGPNCTIPGLWTWLRNSLRPSPSFTHFLLTHGRWFWEFVNATFIREMLMRLVLTVRSNLIPSPPTYNSAHDYISWESFSNVSYYTRILPSVPKDCPTPMGTKGKKQLPDAQLLARRFLLRRKFIPDPQGTNLMFAFFAQHFTHQFFKTSGKMGPGFTKALGHGVDLGHIYGDNLERQYQLRLFKDGKLKYQVLDGEMYPPSVEEAPVLMHYPRGIPPQSQMAVGQEVFGLLPGLMLYATLWLREHNRVCDLLKAEHPTWGDEQLFQTTRLILIGETIKIVIEEYVQQLSGYFLQLKFDPELLFGVQFQYRNRIAMEFNHLYHWHPLMPDSFKVGSQEYSYEQFLFNTSMLVDYGVEALVDAFSRQIAGRIGGGRNMDHHILHVAVDVIRESREMRLQPFNEYRKRFGMKPYTSFQELVGEKEMAAELEELYGDIDALEFYPGLLLEKCHPNSIFGESMIEIGAPFSLKGLLGNPICSPEYWKPSTFGGEVGFNIVKTATLKKLVCLNTKTCPYVSFRVPDASQDDGPAVERPSTEL

SEQ ID NO: 11064 - protein, 599 aa, Homo Sapiens; identical to SEQ ID NO: 11063

SEQ ID NO: 11065 - protein, 163 aa, Homo Sapiens
MLARALLLCAVLALSHTANPCCSHPCQNRGVCMSVGFDQYKCDCTRTGFYGENCSTPEFLTRIKLFLKPTPNTVHYILTHFKGFWNVVNNIPFLRNAIMSYVLTSRSHLIDSPPTYNADYGYKSWEAFSNLSYYTRALPPVPDDCPTPLGVKALHASVFQDRS

SEQ ID NO: 11066 - protein, 604 aa, Homo Sapiens
MLARALLLCAVLALSHTANPCCSHPCQNRGVCMSVGFDQYKCDCTRTGFYGENCSTPEFLTRIKLFLKPTPNTVHYILTHFKGFWNVVNNIPFLRNAIMSYVLTSRSHLIDSPPTYNADYGYKSWEAFSNLSYYTRALPPVPDDCPTPLGVKGKKQLPDSNEIVEKLLLRRKFIPDPQGSNMMFAFFAQHFTHQFFKTDHKRGPAFTNGLGHGVDLNHIYGETLARQRKLRLFKDGKMKYQIIDGEMYPPTVKDTQAEMIYPPQVPEHLRFAVGQEVFGLVPGLMMYATIWLREHNRVCDVLKQEHPEWGDEQLFQTSRLILIGETIKIVIEDYVQHLSGYHFKLKFDPELLFNKQFQYQNRIAAEFNTLYHWHPLLPDTFQIHDQKYNYQQFIYNNSILLEHGITQFVESFTRQIAGRVAGGRNVPPAVQKVSQASIDQSRQMKYQSFNEYRKRFMLKPYESFEELTGEKEMSAELEALYGDIDAVELYPALLVEKPRPDAIFGETMVEVGAPFSLKGLMGNVICSPAYWKPSTFGGEVGFQIINTASIQSLICNNVKGCPFTSFSVPDPELIKTVTINASSSRSGLDDINPTVLLKERSTEL

SEQ ID NO: 11067 - protein, 115 aa, Homo Sapiens
MIPAKDMAKVMIVMLAICFLTKSDGKSVKKRSVSEIQLMHNLGKHLNSMERVEWLRKKLQDVHNFVALGAPLAPRDAGSQRPRKKEDNVLVESHEKSLGEADKADVNVLTKAKSQ

SEQ ID NO: 11068 - protein, 115 aa, Homo Sapiens; identical to SEQ ID NO: 11067

SEQ ID NO: 11069 - protein, 100 aa, Homo Sapiens
METRQVSRSPRVRLLLLLLLLLVVPWGVRTASGVALPPVGVLSLRPPGRAWADPATPRPRRSLALADDAAFRERARLLAALERRHWLNSYMHKLLVLDAP

SEQ ID NO: 11070 - protein, 172 aa, Homo Sapiens
MQRRLVQQWSVAVFLLSYAVPSCGRSVEGLSRRLKRAVSEHQLLHDKGKSIQDLRRRFFLHHLIAEIHTAEIRATSEVSPNSKPSPNTKNHPVRFGSDDEGRYLTQETNKVETYKEQPLKTPGKKKKGKPGKRKEQEKKKRRTRSAWLDSGVTGSGLEGDHLSDTSTTSLEL

SEQ ID NO: 11071 - protein, 175 aa, Homo Sapiens
MQRRLVQQWSVAVFLLSYAVPSCGRSVEGLSRRLKRAVSEHQLLHDKGKSIQDLRRRFFLHHLIAEIHTAEIRATSEVSPNSKPSPNTKNHPVRFGSDDEGRYLTQETNKVETYKEQPLKTPGKKKKGKPGKRKEQEKKKRRTRSAWLDSGVTGSGLEGDHLSDTSTTSLELDSR

SEQ ID NO: 11072 - protein, 175 aa, Homo Sapiens; identical to SEQ ID NO: 11071

SEQ ID NO: 11073 - protein, 175 aa, Homo Sapiens; identical to SEQ ID NO: 11071

SEQ ID NO: 11074 - protein, 177 aa, Homo Sapiens
MQRRLVQQWSVAVFLLSYAVPSCGRSVEGLSRRLKRAVSEHQLLHDKGKSIQDLRRRFFLHHLIAEIHTAEIRATSEVSPNSKPSPNTKNHPVRFGSDDEGRYLTQETNKVETYKEQPLKTPGKKKKGKPGKRKEQEKKKRRTRSAWLDSGVTGSGLEGDHLSDTSTTSLELDSRRH

SEQ ID NO: 11075 - protein, 177 aa, Homo Sapiens; identical to SEQ ID NO: 11074

SEQ ID NO: 11076 - protein, 177 aa, Homo Sapiens; identical to SEQ ID NO: 11074

SEQ ID NO: 11077 - protein, 209 aa, Homo Sapiens
MQRRLVQQWSVAVFLLSYAVPSCGRSVEGLSRRLKRAVSEHQLLHDKGKSIQDLRRRFFLHHLIAEIHTAEIRATSEVSPNSKPSPNTKNHPVRFGSDDEGRYLTQETNKVETYKEQPLKTPGKKKKGKPGKRKEQEKKKRRTRSAWLDSGVTGSGLEGDHLSDTSTTSLELDSRTALLWGLKKKKENNRRTHHMQLMISLFKSPLLLL

SEQ ID NO: 11078 - protein, 111 aa, Homo Sapiens
MSRARAETMQRRLVQQWSVAVFLLSYAVPSCGRSVEGLSRRLKRAVSEHQLLHDKGKSIQDLRRRFFLHHLIAEIHTAEIRATSEVSPNSKPSPNTKNHPVRFGSDDEGRY

SEQ ID NO: 11079 - protein, 269 aa, Homo Sapiens
FSAQPPPSLQWLFEDETPITNRSRPPHLRRATVFANGSLLLTQVRPRNAGIYRCIGQGQRGPPIILEATLHLAEIEDMPLFEPRVFTAGSEERVTCLPPKGLPEPSVWWEHAGVRLPTHGRVYQKGHELVLANIAESDAGVYTCHAANLAGQRRQDVNITVASEHLCPEGQGEVEGNTGLGVMDRGFPAVPSWLKKPQDSQLEEGKPGYLDCLTQATPKPTVVWYRNQMLISEDSRFEVFKNGTLRINSVEVYDGTWYRCMSSTPAGSI

SEQ ID NO: 11080 - protein, 139 aa, Homo Sapiens
MGAARGSPARPRRLPLLSVLLLPLLGGTQTAIVFIKQPSSQDALQGRRALLRCEVEAPGPVHVYWLLDGAPVQDTERRFAQGSSLSFAAVDRLQDSGTFQCVARDDVTGEEARSANASFNIKCESQGGCAQSPCQTLND

SEQ ID NO: 11081 - protein, 157 aa, Homo Sapiens
MGAARGSPARPRRLPLLSVLLLPLLGGTQTAIVFIKQPSSQDALQGRRALLRCEVEAPGPVHVYWLLDGAPVQDTERRFAQGSSLSFAAVDRLQDSGTFQCVARDDVTGEEARSANASFNIKWIEAGPVVLKHPASEAEIQPQTQVTLRCHIDGHPR

SEQ ID NO: 11082 - protein, 1070 aa, Homo Sapiens
MGAARGSPARPRRLPLLSVLLLPLLGGTQTAIVFIKQPSSQDALQGRRALLRCEVEAPGPVHVYWLLDGAPVQDTERRFAQGSSLSFAAVDRLQDSGTFQCVARDDVTGEEARSANASFNIKWIEAGPVVLKHPASEAEIQPQTQVTLRCHIDGHPRPTYQWFRDGTPLSDGQSNHTVSSKERNLTLRPAGPEHSGLYSCCAHSAFGQACSSQNFTLSIADESFARVVLAPQDVVVARYEEAMFHCQFSAQPPPSLQWLFEDETPITNRSRPPHLRRATVFANGSLLLTQVRPRNAGIYRCIGQGQRGPPIILEATLHLAEIEDMPLFEPRVFTAGSEERVTCLPPKGLPEPSVWWEHAGVRLPTHGRVYQKGHELVLANIAESDAGVYTCHAANLAGQRRQDVNITVATVPSWLKKPQDSQLEEGKPGYLDCLTQATPKPTVVWYRNQMLISEDSRFEVFKNGTLRINSVEVYDGTWYRCMSSTPAGSIEAQARVQVLEKLKFTPPPQPQQCMEFDKEATVPCSATGREKPTIKWERADGSSLPEWVTDNAGTLHFARVTRDDAGNYTCIASNGPQGQIRAHVQLTVAVFITFKVEPERTTVYQGHTALLQCEAQGDPKPLIQWKGKDRILDPTKLGPRMHIFQNGSLVIHDVAPEDSGRYTCIAGNSCNIKHTEAPLYVVDKPVPEESEGPGSPPPYKMIQTIGLSVGAAVAYIIAVLGLMFYCKKRCKAKRLQKQPEGEEPEMECLNGGPLQNGQPSAEIQEEVALTSLGSGPAATNKRHSTSDKMHFPRSSLQPITTLGKSEFGEVFLAKAQGLEEGVAETLVLVKSLQSKDEQQQLDFRRELEMFGKLNHANVVRLLGLCREAEPHYMVLEYVDLGDLKQFLRISKSKDEKLKSQPLSTKQKVALCTQVALGMEHLSNNRFVHKDLAARNCLVSAQRQVKVSALGLSKDVYNSEYYHFRQAWVPLRWMSPEAILEGDFSTKSDVWAFGVLMWEVFTHGEMPHGGQADDEVLADLQAGKARLPQPEGCPSKLYRLMQRCWALSPKDRPSFSEIASALGDSTVDSKP

SEQ ID NO: 11083 - protein, 816 aa, Homo Sapiens
MGAARGSPARPRRLPLLSVLLLPLLGGTQTAIVFIKQPSSQDALQGRRALLRCEVEAPGPVHVYWLLDGAPVQDTERRFAQGSSLSFAAVDRLQDSGTFQCVARDDVTGEEARSANASFNIKWIEAGPVVLKHPASEAEIQPQTQVTLRCHIDGHPRPTYQWFRDGTPLSDGQSNHTVSSKERNLTLRPAGPEHSGLYSCCAHSAFGQACSSQNFTLSIADESFARVVLAPQDVVVARYEEAMFHCQFSAQPPPSLQWLFEDETPITNRSRPPHLRRATVFANGSLLLTQVRPRNAGIYRCIGQGQRGPPIILEATLHLAEIEDMPLFEPRVFTAGSEERVTCLPPKGLPEPSVWWEHAGVRLPTHGRVYQKGHELVLANIAESDAGVYTCHAANLAGQRRQDVNITVATVPSWLKKPQDSQLEEGKPGYLDCLTQATPKPTVVWYRNQMLISEDSRFEVFKNGTLRINSVEVYDGTWYRCMSSTPAGSIEAQARVQVLEKLKFTPPPQPQQCMEFDKEATVPCSATGREKPTIKWERADGSSLPEWVTDNAGTLHFARVTRDDAGNYTCIASNGPQGQIRAHVQLTVAVFITFKVEPERTTVYQGHTALLQCEAQGDPKPLIQWKGKDRILDPTKLGPRMHIFQNGSLVIHDVAPEDSGRYTCIAGNSCNIKHTEAPLYVVDKPVPEESEGPGSPPPYKMIQTIGLSVGAAVAYIIAVLGLMFYCKKRCKAKRLQKQPEGEEPEMECLNGGPLQNGQPSAEIQEEVALTSLGSGPAATNKRHSTSDKMHFPRSSLQPITTLGRPQAVPEDFQEQG

SEQ ID NO: 11084 - protein, 940 aa, Homo Sapiens
MGAARGSPARPRRLPLLSVLLLPLLGGTQTAIVFIKQPSSQDALQGRRALLRCEVEAPGPVHVYWLLDGAPVQDTERRFAQGSSLSFAAVDRLQDSGTFQCVARDDVTGEEARSANASFNIKWIEAGPVVLKHPASEAEIQPQTQVTLRCHIDGHPRPTYQWFRDGTPLSDGQSNHTVSSKERNLTLRPAGPEHSGLYSCCAHSAFGQACSSQNFTLSIADESFARVVLAPQDVVVARYEEAMFHCQFSAQPPPSLQWLFEDETPITNRSRPPHLRRATVFANGSLLLTQVRPRNAGIYRCIGQGQRGPPIILEATLHLAEIEDMPLFEPRVFTAGSEERVTCLPPKGLPEPSVWWEHAGVRLPTHGRVYQKGHELVLANIAESDAGVYTCHAANLAGQRRQDVNITVANGSSLPEWVTDNAGTLHFARVTRDDAGNYTCIASNGPQGQIRAHVQLTVAVFITFKVEPERTTVYQGHTALLQCEAQGDPKPLIQWKGKDRILDPTKLGPRMHIFQNGSLVIHDVAPEDSGRYTCIAGNSCNIKHTEAPLYVVDKPVPEESEGPGSPPPYKMIQTIGLSVGAAVAYIIAVLGLMFYCKKRCKAKRLQKQPEGEEPEMECLNGGPLQNGQPSAEIQEEVALTSLGSGPAATNKRHSTSDKMHFPRSSLQPITTLGKSEFGEVFLAKAQGLEEGVAETLVLVKSLQSKDEQQQLDFRRELEMFGKLNHANVVRLLGLCREAEPHYMVLEYVDLGDLKQFLRISKSKDEKLKSQPLSTKQKVALCTQVALGMEHLSNNRFVHKDLAARNCLVSAQRQVKVSALGLSKDVYNSEYYHFRQAWVPLRWMSPEAILEGDFSTKSDVWAFGVLMWEVFTHGEMPHGGQADDEVLADLQAGKARLPQPEGCPSKLYRLMQRCWALSPKDRPSFSEIASALGDSTVDSKP

SEQ ID NO: 11085 - protein, 1030 aa, Homo Sapiens
MGAARGSPARPRRLPLLSVLLLPLLGGTQTAIVFIKQPSSQDALQGRRALLRCEVEAPGPVHVYWLLDGAPVQDTERRFAQGSSLSFAAVDRLQDSGTFQCVARDDVTGEEARSANASFNIKWIEAGPVVLKHPASEAEIQPQTQVTLRCHIDGHPRPTYQWFRDGTPLSDGQSNHTVSSKERNLTLRPAGPEHSGLYSCCAHSAFGQACSSQNFTLSIADESFARVVLAPQDVVVARYEEAMFHCQFSAQPPPSLQWLFEDETPITNRSRPPHLRRATVFANGSLLLTQVRPRNAGIYRCIGQGQRGPPIILEATLHLAEIEDMPLFEPRVFTAGSEERVTCLPPKGLPEPSVWWEHAGVRLPTHGRVYQKGHELVLANIAESDAGVYTCHAANLAGQRRQDVNITVATVPSWLKKPQDSQLEEGKPGYLDCLTQATPKPTVVWYRNQMLISEDSRFEVFKNGTLRINSVEVYDGTWYRCMSSTPAGSIEAQARVQVLDGSSLPEWVTDNAGTLHFARVTRDDAGNYTCIASNGPQGQIRAHVQLTVAVFITFKVEPERTTVYQGHTALLQCEAQGDPKPLIQWKGKDRILDPTKLGPRMHIFQNGSLVIHDVAPEDSGRYTCIAGNSCNIKHTEAPLYVVDKPVPEESEGPGSPPPYKMIQTIGLSVGAAVAYIIAVLGLMFYCKKRCKAKRLQKQPEGEEPEMECLNGGPLQNGQPSAEIQEEVALTSLGSGPAATNKRHSTSDKMHFPRSSLQPITTLGKSEFGEVFLAKAQGLEEGVAETLVLVKSLQSKDEQQQLDFRRELEMFGKLNHANVVRLLGLCREAEPHYMVLEYVDLGDLKQFLRISKSKDEKLKSQPLSTKQKVALCTQVALGMEHLSNNRFVHKDLAARNCLVSAQRQVKVSALGLSKDVYNSEYYHFRQAWVPLRWMSPEAILEGDFSTKSDVWAFGVLMWEVFTHGEMPHGGQADDEVLADLQAGKARLPQPEGCPSKLYRLMQRCWALSPKDRPSFSEIASALGDSTVDSKP

SEQ ID NO: 11086 - protein, 1014 aa, Homo Sapiens
MGAARGSPARPRRLPLLSVLLLPLLGGTQTAIVFIKQPSSQDALQGRRALLRCEVEAPGPVHVYWLLDGAPVQDTERRFAQGSSLSFAAVDRLQDSGTFQCVARDDVTGEEARSANASFNIKWIEAGPVVLKHPASEAEIQPQTQVTLRCHIDGHPRPTYQWFRDGTPLSDGQSNHTVSSKERNLTLRPAGPEHSGLYSCCAHSAFGQACSSQNFTLSIADESFARVVLAPQDVVVARYEEAMFHCQFSAQPPPSLQWLFEDETPITNRSRPPHLRRATVFANGSLLLTQVRPRNAGIYRCIGQGQRGPPIILEATLHLAEIEDMPLFEPRVFTAGSEERVTCLPPKGLPEPSVWWEHAGVRLPTHGRVYQKGHELVLANIAESDAGVYTCHAANLAGQRRQDVNITVATVPSWLKKPQDSQLEEGKPGYLDCLTQATPKPTVVWYRNQMLISEDSRFEVFKNGTLRINSVEVYDGTWYRCMSSTPAGSIEAQARVQVLEKLKFTPPPQPQQCMEFDKEATVPCSATGREKPTIKWERADGSSLPEWVTDNAGTLHFARVTRDDAGNYTCIASNGPQGQIRAHVQLTVAVFITFKVEPERTTVYQGHTALLQCEAQGDPKPLIQWKDKPVPEESEGPGSPPPYKMIQTIGLSVGAAVAYIIAVLGLMFYCKKRCKAKRLQKQPEGEEPEMECLNGGPLQNGQPSAEIQEEVALTSLGSGPAATNKRHSTSDKMHFPRSSLQPITTLGKSEFGEVFLAKAQGLEEGVAETLVLVKSLQSKDEQQQLDFRRELEMFGKLNHANVVRLLGLCREAEPHYMVLEYVDLGDLKQFLRISKSKDEKLKSQPLSTKQKVALCTQVALGMEHLSNNRFVHKDLAARNCLVSAQRQVKVSALGLSKDVYNSEYYHFRQAWVPLRWMSPEAILEGDFSTKSDVWAFGVLMWEVFTHGEMPHGGQADDEVLADLQAGKARLPQPEGCPSKLYRLMQRCWALSPKDRPSFSEIASALGDSTVDSKP

SEQ ID NO: 11087 - protein, 459 aa, Homo Sapiens
MGAARGSPARPRRLPLLSVLLLPLLGGTQTAIVFIKQPSSQDALQGRRALLRCEVEAPGPVHVYWLLDGAPVQDTERRFAQGSSLSFAAVDRLQDSGTFQCVARDDVTGEEARSANASFNIKWIEAGPVVLKHPASEAEIQPQTQVTLRCHIDGHPRPTYQWFRDGTPLSDGQSNHTVSSKERNLTLRPAGPEHSGLYSCCAHSAFGQACSSQNFTLSIADESFARVVLAPQDVVVARYEEAMFHCQFSAQPPPSLQWLFEDETPITNRSRPPHLRRATVFANGSLLLTQVRPRNAGIYRCIGQGQRGPPIILEATLHLAEIEDMPLFEPRVFTAGSEERVTCLPPKGLPEPSVWWEHAGVRLPTHGRVYQKGHELVLANIAESDAGVYTCHAANLAGQRRQDVNITVASEHLCPEGQGEVEGNTGLGVMDRGFPGTHLRSSQFWALQAWESVHYWESV

SEQ ID NO: 11088 - protein, 1078 aa, Homo Sapiens
MGSFLSGEKRPSAPTVGSAMEKKEFPTPPGRVGPGTQTAIVFIKQPSSQDALQGRRALLRCEVEAPGPVHVYWLLDGAPVQDTERRFAQGSSLSFAAVDRLQDSGTFQCVARDDVTGEEARSANASFNIKWIEAGPVVLKHPASEAEIQPQTQVTLRCHIDGHPRPTYQWFRDGTPLSDGQSNHTVSSKERNLTLRPAGPEHSGLYSCCAHSAFGQACSSQNFTLSIADESFARVVLAPQDVVVARYEEAMFHCQFSAQPPPSLQWLFEDETPITNRSRPPHLRRATVFANGSLLLTQVRPRNAGIYRCIGQGQRGPPIILEATLHLAEIEDMPLFEPRVFTAGSEERVTCLPPKGLPEPSVWWEHAGVRLPTHGRVYQKGHELVLANIAESDAGVYTCHAANLAGQRRQDVNITVATVPSWLKKPQDSQLEEGKPGYLDCLTQATPKPTVVWYRNQMLISEDSRFEVFKNGTLRINSVEVYDGTWYRCMSSTPAGSIEAQARVQVLEKLKFTPPPQPQQCMEFDKEATVPCSATGREKPTIKWERADGSSLPEWVTDNAGTLHFARVTRDDAGNYTCIASNGPQGQIRAHVQLTVAVFITFKVEPERTTVYQGHTALLQCEAQGDPKPLIQWKGKDRILDPTKLGPRMHIFQNGSLVIHDVAPEDSGRYTCIAGNSCNIKHTEAPLYVVDKPVPEESEGPGSPPPYKMIQTIGLSVGAAVAYIIAVLGLMFYCKKRCKAKRLQKQPEGEEPEMECLNGGPLQNGQPSAEIQEEVALTSLGSGPAATNKRHSTSDKMHFPRSSLQPITTLGKSEFGEVFLAKAQGLEEGVAETLVLVKSLQSKDEQQQLDFRRELEMFGKLNHANVVRLLGLCREAEPHYMVLEYVDLGDLKQFLRISKSKDEKLKSQPLSTKQKVALCTQVALGMEHLSNNRFVHKDLAARNCLVSAQRQVKVSALGLSKDVYNSEYYHFRQAWVPLRWMSPEAILEGDFSTKSDVWAFGVLMWEVFTHGEMPHGGQADDEVLADLQAGKARLPQPEGCPSKLYRLMQRCWALSPKDRPSFSEIASALGDSTVDSKP

SEQ ID NO: 11089 - protein, 257 aa, Homo Sapiens
MVARVSGLIVTLLSSSFPGGPLQNGQPSAEIQEEVALTSLGSGPAATNKRHSTSDKMHFPRSSLQPITTLGKSEFGEVFLAKAQGLEEGVAETLVLVKSLQSKDEQQQLDFRRELEMFGKLNHANVVRLLGLCREAEPHYMVLEYVDLGDLKQFLRISKSKDEKLKSQPLSTKQKVALCTQVALGMEHLSNNRFVHKDLAARNCLVSAQRQVKVSALGLSKDVYNSEYYHFRQAWVPLRWMSPEAILEGDFSTKSDV

SEQ ID NO: 11090 - protein, 84 aa, Homo Sapiens
MVARVSGLIVTLLSSSFPGGPLQNGQPSAEIQEEVALTSLGSGPAATNKRHSTSDKMHFPRSSLQPITTLGRPQAVPEDFQEQG

SEQ ID NO: 11091 - protein, 25 aa, Homo Sapiens
TEHGTEAIFVAAVGIRPSHHAAAQS

SEQ ID NO: 11092 - protein, 25 aa, Homo Sapiens
TEHGTEAIFVAAVGIRPSHHAAAQS

SEQ ID NO: 11093 - protein, 365 aa, Homo Sapiens
  misc_feature (1)..(1): Xaa can be any naturally occurring amino acid
XEHAGVRLPTHGRVYQKGHELVLANIAESDAGVYTCHAANLAGQRRQDVNITVATVPSWLKKPQDSQLEEGKPGYLDCLTQATPKPTVVWYRNQMLISEDSRFEVFLAKAQGLEEGVAETLVLVKSLQSKDEQQQLDFRRELEMFGKLNHANVVRLLGLCREAEPHYMVLEYVDLGDLKQFLRISKSKDEKLKSQPLSTKQKVALCTQVALGMEHLSNNRFVHKDLAARNCLVSAQRQVKVSALGLSKDVYNSEYYHFRQAWVPLRWMSPEAILEGDFSTKSDVWAFGVLMWEVFTHGEMPHGGQADDEVLADLQAGKARLPQPEGCPSKLYRLMQRCWALSPKDRPSFSEIASALGDSTVDSKP

SEQ ID NO: 11094 - protein, 25 aa, Homo Sapiens
  misc_feature (1)..(1): Xaa can be any naturally occurring amino acid
XEHGTEAIFVAAVGIRPSHHAAAQS

SEQ ID NO: 11095 - protein, 168 aa, Homo Sapiens
MQAQQYQQQRRKFAAAFLAFIFILAAVDTAEAGKKEKPEKKVKKSDCGEWQWSVCVPTSGDCGLGTREGTRTGAECKQTMKTQRCKIPCNWKKQFGAECKYQFQAWGECDLNTALKTRTGSLKRALHNAECQKTVTISKPCGKLTKPKPQAESKKKKKEGKKQEKMLD

SEQ ID NO: 11096 - protein, 166 aa, Homo Sapiens
MQAQQYQQQRRKFAAAFLAFIFILAAVDTAEAGKKEKPEKKVKKSDCGEWQWSVCVPTSGDCGLGTREGTRTGAECKQTMKTQRCKIPCNWKKQFGAECKYQFQAWGECDLNTALKTRTGSLKRALHNAECQKTVTISKPCGKLTKPKPQEKGKWRHRSGESLRRW

SEQ ID NO: 11097 - protein, 138 aa, Homo Sapiens
MDSWFILVLLGSGLICVSANNATTVAPSVGITRLINSSTAEPVKEEAKTSNPTSSLTSLSVAPTFSPNITLGPTYLTTVNSSDSDNGTTRTASTNSIGITISPNGTWLPDNQFTDARTEPWEGNSSTAATTPETFPPS

SEQ ID NO: 11098 - protein, 253 aa, Homo Sapiens
MDSWFILVLLGSGLICVSANNATTVAPSVGITRLINSSTAEPVKEEAKTSNPTSSLTSLSVAPTFSPNITLGPTYLTTVNSSDSDNGTTRTASTNSIGITISPNGTWLPDNQFTDARTEPWEGNSSTAATTPETFPPSDETPIIAVMVALSSLLVIVFIIIVLYMLRFKKYKQAGSHSNSFRLSNGRTEDVEPQSVPLLARSPSTNRKYPPLPVDKLEEEINRRMADDNKLFREEFNALPACPIQATCEAASK

SEQ ID NO: 11099 - protein, 793 aa, Homo Sapiens
MDSWFILVLLGSGLICVSANNATTVAPSVGITRLINSSTAEPVKEEAKTSNPTSSLTSLSVAPTFSPNITLGPTYLTTVNSSDSDNGTTRTASTNSIGITISPNGTWLPDNQFTDARTEPWEGNSSTAATTPETFPPSDETPIIAVMVALSSLLVIVFIIIVLYMLRFKKYKQAGSHSNSFRLSNGRTEDVEPQSVPLLARSPSTNRKYPPLPVDKLEEEINRRMADDNKLFREEFNALPACPIQATCEAASKEENKEKNRYVNILPYDHSRVHLTPVEGVPDSDYINASFINGYQEKNKFIAAQGPKEETVNDFWRMIWEQNTATIVMVTNLKERKECKCAQYWPDQGCWTYGNIRVSVEDVTVLVDYTVRKFCIQQVGDMTNRKPQRLITQFHFTSWPDFGVPFTPIGMLKFLKKVKACNPQYAGAIVVHCSAGVGRTGTFVVIDAMLDMMHTERKVDVYGFVSRIRAQRCQMVQTDMQYVFIYQALLEHYLYGDTELEVTSLETHLQKIYNKIPGTSNNGLEEEFKKLTSIKIQNDKMRTGNLPANMKKNRVLQIIPYEFNRVIIPVKRGEENTDYVNASFIDGYRQKDSYIASQGPLLHTIEDFWRMIWEWKSCSIVMLTELEERGQEKCAQYWPSDGLVSYGDITVELKKEEECESYTVRDLLVTNTRENKSRQIRQFHFHGWPEVGIPSDGKGMISIIAAVQKQQQQSGNHPITVHCSAGAGRTGTFCALSTVLERVKAEGILDVFQTVKSLRLQRPHMVQTLEQYEFCYKVVQEYIDAFSDYANFK

SEQ ID NO: 11100 - protein, 793 aa, Homo Sapiens; identical to SEQ ID NO: 11099

SEQ ID NO: 11101 - protein, 793 aa, Homo Sapiens; identical to SEQ ID NO: 11099

SEQ ID NO: 11102 - protein, 175 aa, Homo Sapiens
MDSWFILVLLGSGLICVSANNATTVAPSVGITRLINSSTAEPVKEEAKTSNPTSSLTSLSVAPTFSPNITLGPTYLTTVNSSDSDNGTTRTASTNSIGITISPNGTWLPDNQFTDARTEPWEGNSSTAATTPETFPPSGNSDSKDRRDETPIIAVMVALSSLLVIVFIIIVLYML

SEQ ID NO: 11103 - protein, 802 aa, Homo Sapiens
MDSWFILVLLGSGLICVSANNATTVAPSVGITRLINSSTAEPVKEEAKTSNPTSSLTSLSVAPTFSPNITLGPTYLTTVNSSDSDNGTTRTASTNSIGITISPNGTWLPDNQFTDARTEPWEGNSSTAATTPETFPPSGNSDSKDRRDETPIIAVMVALSSLLVIVFIIIVLYMLRFKKYKQAGSHSNSFRLSNGRTEDVEPQSVPLLARSPSTNRKYPPLPVDKLEEEINRRMADDNKLFREEFNALPACPIQATCEAASKEENKEKNRYVNILPYDHSRVHLTPVEGVPDSDYINASFINGYQEKNKFIAAQGPKEETVNDFWRMIWEQNTATIVMVTNLKERKECKCAQYWPDQGCWTYGNIRVSVEDVTVLVDYTVRKFCIQQVGDMTNRKPQRLITQFHFTSWPDFGVPFTPIGMLKFLKKVKACNPQYAGAIVVHCSAGVGRTGTFVVIDAMLDMMHTERKVDVYGFVSRIRAQRCQMVQTDMQYVFIYQALLEHYLYGDTELEVTSLETHLQKIYNKIPGTSNNGLEEEFKKLTSIKIQNDKMRTGNLPANMKKNRVLQIIPYEFNRVIIPVKRGEENTDYVNASFIDGYRQKDSYIASQGPLLHTIEDFWRMIWEWKSCSIVMLTELEERGQEKCAQYWPSDGLVSYGDITVELKKEEECESYTVRDLLVTNTRENKSRQIRQFHFHGWPEVGIPSDGKGMISIIAAVQKQQQQSGNHPITVHCSAGAGRTGTFCALSTVLERVKAEGILDVFQTVKSLRLQRPHMVQTLEQYEFCYKVVQEYIDAFSDYANFK

SEQ ID NO: 11104 - protein, 802 aa, Homo Sapiens; identical to SEQ ID NO: 11103

SEQ ID NO: 11105 - protein, 1407 aa, Homo Sapiens
MEAEFYMVILTCLIFRNSEGFQIVHVQKQQCLFKNEKVVVGSCNRTIQNQQWMWTEDEKLLHVKSALCLAFIRNAAENYSQNSSERQHPNLHMTGITDTSWVLSTTQPFSSTTEETGLAEPERCNFTLAESKASSHSVSIQWRILGSPCNFSLIYSSDTLGAALCPTFRIDNTTYGCNLQDLQAGTIYNFRIISLDEERTVVLQTDPLPPARFGVSKEKTTSTSLHVWWTPSSGKVTSYEVQLFDENNQKIQGVQIQESTSWNEYTFFNLTAGSKYNIAITAVSGGKRSFSVYTNGSTVPSPVKDIGISTKANSLLISWSHGSGNVERYRLMLMDKGILVHGGVVDKHATSYAFHGLTPGYLYNLTVMTEAAGLQNYRWKLVRTAPMEVSNLKVTNDGSLTSLKVKWQRPPGNVDSYNITLSHKGTIKESRVLAPWITETHFKELVPGRLYQVTVSCVSGELSAQKMAVGRTFPDKVANLEANNNGRMRSLVVSWSPPAGDWEQYRILLFNDSVVLLNITVGKEETQYVMDDTGLVPGRQYEVEVIVESGNLKNSERCQGRTVPLAVLQLRVKHANETSLSIMWQTPVAEWEKYIISLADRDLLLIHKSLSKDAKEFTFTDLVPGRKYMATVTSISGDLKNSSSVKGRTVPAQVTDLHVANQGMTSSLFTNWTQAQGDVEFYQVLLIHENVVIKNESISSETSRYSFHSLKSGSLYSVVVTTVSGGISSRQVVVEGRTVPSSVSGVTVNNSGRNDYLSVSWLLAPGDVDNYEVTLSHDGKVVQSLVIAKSVRECSFSSLTPGRLYTVTITTRSGKYENHSFSQERTVPDKVQGVSVSNSARSDYLRVSWVHATGDFDHYEVTIKNKNNFIQTKSIPKSENECVFVQLVPGRLYSVTVTTKSGQYEANEQGNGRTIPEPVKDLTLRNRSTEDLHVTWSGANGDVDQYEIQLLFNDMKVFPPFHLVNTATEYRFTSLTPGRQYKILVLTISGDVQQSAFIEGFTVPSAVKNIHISPNGATDSLTVNWTPGGGDVDSYTVSAFRHSQKVDSQTIPKHVFEHTFHRLEAGEQYQIMIASVSGSLKNQINVVGRTVPASVQGVIADNAYSSYSLIVSWQKAAGVAERYDILLLTENGILLRNTSEPATTKQHKFEDLTPGKKYKIQILTVSGGLFSKEAQTEGRTVPAAVTDLRITENSTRHLSFRWTASEGELSWYNIFLYNPDGNLQERAQVDPLVQSFSFQNLLQGRMYKMVIVTHSGELSNESFIFGRTVPASVSHLRGSNRNTTDSLWFNWSPASGDFDFYELILYNPNGTKKENWKDKDLTEWRFQGLVPGRKYVLWVVTHSGDLSNKVTAESRTAPSPPSLMSFADIANTSLAITWKGPPDWTDYNDFELQWLPRDALTVFNPYN

SEQ ID NO: 11106 - protein, 2215 aa, Homo Sapiens
MEAEFYMVILTCLIFRNSEGFQIVHVQKQQCLFKNEKVVVGSCNRTIQNQQWMWTEDEKLLHVKSALCLAISNSSRGPSRSAILDRCSQAPRWTCYDQEGFLEVENASLFLQKQGSRVVVKKARKYLHSWMKIDVNKEGKLVNESLCLQKAGLGAEVSVRSTRNTAPPQILTTFNAVPDGLVFLIRNTTEAFIRNAAENYSQNSSERQHPNLHMTGITDTSWVLSTTQPFSSTTEETGLAEPERCNFTLAESKASSHSVSIQWRILGSPCNFSLIYSSDTLGAALCPTFRIDNTTYGCNLQDLQAGTIYNFRIISLDEERTVVLQTDPLPPARFGVSKEKTTSTSLHVWWTPSSGKVTSYEVQLFDENNQKIQGVQIQESTSWNEYTFFNLTAGSKYNIAITAVSGGKRSFSVYTNGSTVPSPVKDIGISTKANSLLISWSHGSGNVERYRLMLMDKGILVHGGVVDKHATSYAFHGLTPGYLYNLTVMTEAAGLQNYRWKLVRTAPMEVSNLKVTNDGSLTSLKVKWQRPPGNVDSYNITLSHKGTIKESRVLAPWITETHFKELVPGRLYQVTVSCVSGELSAQKMAVGRTFPDKVANLEANNNGRMRSLVVSWSPPAGDWEQYRILLFNDSVVLLNITVGKEETQYVMDDTGLVPGRQYEVEVIVESGNLKNSERCQGRTVPLAVLQLRVKHANETSLSIMWQTPVAEWEKYIISLADRDLLLIHKSLSKDAKEFTFTDLVPGRKYMATVTSISGDLKNSSSVKGRTVPAQVTDLHVANQGMTSSLFTNWTQAQGDVEFYQVLLIHENVVIKNESISSETSRYSFHSLKSGSLYSVVVTTVSGGISSRQVVVEGRTVPSSVSGVTVNNSGRNDYLSVSWLLAPGDVDNYEVTLSHDGKVVQSLVIAKSVRECSFSSLTPGRLYTVTITTRSGKYENHSFSQERTVPDKVQGVSVSNSARSDYLRVSWVHATGDFDHYEVTIKNKNNFIQTKSIPKSENECVFVQLVPGRLYSVTVTTKSGQYEANEQGNGRTIPEPVKDLTLRNRSTEDLHVTWSGANGDVDQYEIQLLFNDMKVFPPFHLVNTATEYRFTSLTPGRQYKILVLTISGDVQQSAFIEGFTVPSAVKNIHISPNGATDSLTVNWTPGGGDVDSYTVSAFRHSQKVDSQTIPKHVFEHTFHRLEAGEQYQIMIASVSGSLKNQINVVGRTVPASVQGVIADNAYSSYSLIVSWQKAAGVAERYDILLLTENGILLRNTSEPATTKQHKFEDLTPGKKYKIQILTVSGGLFSKEAQTEGRTVPAAVTDLRITENSTRHLSFRWTASEGELSWYNIFLYNPDGNLQERAQVDPLVQSFSFQNLLQGRMYKMVIVTHSGELSNESFIFGRTVPASVSHLRGSNRNTTDSLWFNWSPASGDFDFYELILYNPNGTKKENWKDKDLTEWRFQGLVPGRKYVLWVVTHSGDLSNKVTAESRTAPSPPSLMSFADIANTSLAITWKGPPDWTDYNDFELQWLPRDALTVFNPYNNRKSEGRIVYGLRPGRSYQFNVKTVSGDSWKTYSKPIFGSVRTKPDKIQNLHCRPQNSTAIACSWIPPDSDFDGYSIECRKMDTQEVEFSRKLEKEKSLLNIMMLVPHKRYLVSIKVQSAGMTSEVVEDSTITMIDRPPPPPPHIRVNEKDVLISKSSINFTVNCSWFSDTNGAVKYFTVVVREADGSDELKPEQQHPLPSYLEYRHNASIRVYQTNYFASKCAENPNSNSKSFNIKLGAEMESLGGKCDPTQQKFCDGPLKPHTAYRISIRAFTQLFDEDLKEFTKPLYSDTFFSLPITTESEPLFGAIEGVSAGLFLIGMLVAVVALLICRQKVSHGRERPSARLSIRRDRPLSVHLNLGQKGNRKTSCPIKINQFEGHFMKLQADSNYLLSKEYEELKDVGRNQSCDIALLPENRGKNRYNNILPYDATRVKLSNVDDDPCSDYINASYIPGNNFRREYIVTQGPLPGTKDDFWKMVWEQNVHNIVMVTQCVEKGRVKCDHYWPADQDSLYYGDLILQMLSESVLPEWTIREFKICGEEQLDAHRLIRHFHYTVWPDHGVPETTQSLIQFVRTVRDYINRSPGAGPTVVHCSAGVGRTGTFIALDRILQQLDSKDSVDIYGAVHDLRLHRVHMVQTECQYVYLHQCVRDVLRARKLRSEQENPLFPIYENVNPEYHRDPVYSRH

SEQ ID NO: 11107 - protein, 2127 aa, Homo Sapiens
MEAEFYMVILTCLIFRNSEGFQIVHVQKQQCLFKNEKVVVGSCNRTIQNQQWMWTEDEKLLHVKSALCLAISNSSRGPSRSAILDRCSQAPRWTCYDQEGFLEVENASLFLQKQGSRVVVKKARKYLHSWMKIDVNKEGKLVNESLCLQKAGLGAEVSVRSTRNTAPPQILTTFNAVPDGLVFLIRNTTEAFIRNAAENYSQNSSERQHPNLHMTGITDTSWVLSTTQPFSSTTEETGLAEPERCNFTLAESKASSHSVSIQWRILGSPCNFSLIYSSDTLGAALCPTFRIDNTTYGCNLQDLQAGTIYNFRIISLDEERTVVLQTDPLPPARFGVSKEKTTSTSLHVWWTPSSGKVTSYEVQLFDENNQKIQGVQIQESTSWNEYTFFNLTAGSKYNIAITAVSGGKRSFSVYTNGSTVPSPVKDIGISTKANSLLISWSHGSGNVERYRLMLMDKGILVHGGVVDKHATSYAFHGLTPGYLYNLTVMTEAAGLQNYRWKLVRTAPMEVSNLKVTNDGSLTSLKVKWQRPPGNVDSYNITLSHKGTIKESRVLAPWITETHFKELVPGRLYQVTVSCVSGELSAQKMAVGRTFPDKVANLEANNNGRMRSLVVSWSPPAGDWEQYRILLFNDSVVLLNITVGKEETQYVMDDTGLVPGRQYEVEVIVESGNLKNSERCQGRTVPLAVLQLRVKHANETSLSIMWQTPVAEWEKYIISLADRDLLLIHKSLSKDAKEFTFTDLVPGRKYMATVTSISGDLKNSSSVKGRTVPAQVTDLHVANQGMTSSLFTNWTQAQGDVEFYQVLLIHENVVIKNESISSETSRYSFHSLKSGSLYSVVVTTVSGGISSRQVVVEGRTVPDKVQGVSVSNSARSDYLRVSWVHATGDFDHYEVTIKNKNNFIQTKSIPKSENECVFVQLVPGRLYSVTVTTKSGQYEANEQGNGRTIPEPVKDLTLRNRSTEDLHVTWSGANGDVDQYEIQLLFNDMKVFPPFHLVNTATEYRFTSLTPGRQYKILVLTISGDVQQSAFIEGFTVPSAVKNIHISPNGATDSLTVNWTPGGGDVDSYTVSAFRHSQKVDSQTIPKHVFEHTFHRLEAGEQYQIMIASVSGSLKNQINVVGRTVPASVQGVIADNAYSSYSLIVSWQKAAGVAERYDILLLTENGILLRNTSEPATTKQHKFEDLTPGKKYKIQILTVSGGLFSKEAQTEGRTVPAAVTDLRITENSTRHLSFRWTASEGELSWYNIFLYNPDGNLQERAQVDPLVQSFSFQNLLQGRMYKMVIVTHSGELSNESFIFGRTVPASVSHLRGSNRNTTDSLWFNWSPASGDFDFYELILYNPNGTKKENWKDKDLTEWRFQGLVPGRKYVLWVVTHSGDLSNKVTAESRTAPSPPSLMSFADIANTSLAITWKGPPDWTDYNDFELQWLPRDALTVFNPYNNRKSEGRIVYGLRPGRSYQFNVKTVSGDSWKTYSKPIFGSVRTKPDKIQNLHCRPQNSTAIACSWIPPDSDFDGYSIECRKMDTQEVEFSRKLEKEKSLLNIMMLVPHKRYLVSIKVQSAGMTSEVVEDSTITMIDRPPPPPPHIRVNEKDVLISKSSINFTVNCSWFSDTNGAVKYFTVVVREADGSDELKPEQQHPLPSYLEYRHNASIRVYQTNYFASKCAENPNSNSKSFNIKLGAEMESLGGKCDPTQQKFCDGPLKPHTAYRISIRAFTQLFDEDLKEFTKPLYSDTFFSLPITTESEPLFGAIEGVSAGLFLIGMLVAVVALLICRQKVSHGRERPSARLSIRRDRPLSVHLNLGQKGNRKTSCPIKINQFEGHFMKLQADSNYLLSKEYEELKDVGRNQSCDIALLPENRGKNRYNNILPYDATRVKLSNVDDDPCSDYINASYIPGNNFRREYIVTQGPLPGTKDDFWKMVWEQNVHNIVMVTQCVEKGRVKCDHYWPADQDSLYYGDLILQMLSESVLPEWTIREFKICGEEQLDAHRLIRHFHYTVWPDHGVPETTQSLIQFVRTVRDYINRSPGAGPTVVHCSAGVGRTGTFIALDRILQQLDSKDSVDIYGAVHDLRLHRVHMVQTECQYVYLHQCVRDVLRARKLRSEQENPLFPIYENVNPEYHRDPVYSRH

SEQ ID NO: 11108 - protein, 1583 aa, Homo Sapiens
MEAEFYMVILTCLIFRNSGFQIVHVQKQQCLFKNEKVVVGSCNRTIQNQQWMWTEDEKLLHVKSALCLAISNSSRGPSRSAILDRCSQAPRWTCYDQEGFLEVENASLFLQKQGSRVVVKKARKYLHSWMKIDVNKEGKLVNESLCLQKAGLGAEVSVRSTRNTAPPQILTTFNAVPDGLVFLIRNTTEAFIRNAAENYSQNSSERQHPNLHMTGITDTSWVLSTTQPFSSTTEETGLAEPERCNFTLAESKASSHSVSIQWRILGSPCNFSLIYSSDTLGAALCPTFRIDNTTYGCNLQDLQAGTIYNFRIISLDEERTVVLQTDPLPPARFGVSKEKTTSTSLHVWWTPSSGKVTSYEVQLFDENNQKIQGVQIQESTSWNEYTFFNLTAGSKYNIAITAVSGGKRSFSVYTNGSTVPSPVKDIGISTKANSLLISWSHGSGNVERYRLMLMDKGILVHGGVVDKHATSYAFHGLTPGYLYNLTVMTEAAGLQNYRWKLVRTAPMEVSNLKVTNDGSLTSLKVKWQRPPGNVDSYNITLSHKGTIKESRVLAPWITETHFKELVPGRLYQVTVSCVSGELSAQKMAVGRTFPDKVANLEANNNGRMRSLVVSWSPPAGDWEQYRILLFNDSVVLLNITVGKEETQYVMDDTGLVPGRQYEVEVIVESGNLKNSERCQGRTVPLAVLQLRVKHANETSLSIMWQTPVAEWEKYIISLADRDLLLIHKSLSKDAKEFTFTDLVPGRKYMATVTSISGDLKNSSSVKGRTVPAQVTDLHVANQGMTSSLFTNWTQAQGDVEFYQVLLIHENVVIKNESISSETSRYSFHSLKSGSLYSVVVTTVSGGISSRQVVVEGRTVPSSVSGVTVNNSGRNDYLSVSWLLAPGDVDNYEVTLSHDGKVVQSLVIAKSVRECSFSSLTPGRLYTVTITTRSGKYENHSFSQERTVPDKVQGVSVSNSARSDYLRVSWVHATGDFDHYEVTIKNKNNFIQTKSIPKSENECVFVQLVPGRLYSVTVTTKSGQYEANEQGNGRTIPEPVKDLTLRNRSTEDLHVTWSGANGDVDQYEIQLLFNDMKVFPPFHLVNTATEYRFTSLTPGRQYKILVLTISGDVQQSAFIEGFTVPSAVKNIHISPNGATDSLTVNWTPGGGDVDSYTVSAFRHSQKVDSQTIPKHVFEHTFHRLEAGEQYQIMIASVSGSLKNQINVVGRTVPASVQGVIADNAYSSYSLIVSWQKAAGVAERYDILLLTENGILLRNTSEPATTKQHKFEDLTPGKKYKIQILTVSGGLFSKEAQTEGRTVPAAVTDLRITENSTRHLSFRWTASEGELSWYNIFLYNPDGNLQERAQVDPLVQSFSFQNLLQGRMYKMVIVTHSGELSNESFIFGRTVPASVSHLRGSNRNTTDSLWFNWSPASGDFDFYELILYNPNGTKKENWKDKDLTEWRFQGLVPGRKYVLWVVTHSGDLSNKVTAESRTAPSPPSLMSFADIANTSLAITWKGPPDWTDYNDFELQWLPRDALTVFNPYNNRKSEGRIVYGLRPGRSYQFNVKTVSGDSWKTYSKPIFGSVRTSMTCFATLISQME

SEQ ID NO: 11109 - protein, 1997 aa, Homo Sapiens
MLSHGAGLALWITLSLLQTGLAEPERCNFTLAESKASSHSVSIQWRILGSPCNFSLIYSSDTLGAALCPTFRIDNTTYGCNLQDLQAGTIYNFRIISLDEERTVVLQTDPLPPARFGVSKEKTTSTSLHVWWTPSSGKVTSYEVQLFDENNQKIQGVQIQESTSWNEYTFFNLTAGSKYNIAITAVSGGKRSFSVYTNGSTVPSPVKDIGISTKANSLLISWSHGSGNVERYRLMLMDKGILVHGGVVDKHATSYAFHGLTPGYLYNLTVMTEAAGLQNYRWKLVRTAPMEVSNLKVTNDGSLTSLKVKWQRPPGNVDSYNITLSHKGTIKESRVLAPWITETHFKELVPGRLYQVTVSCVSGELSAQKMAVGRTFPDKVANLEANNNGRMRSLVVSWSPPAGDWEQYRILLFNDSVVLLNITVGKEETQYVMDDTGLVPGRQYEVEVIVESGNLKNSERCQGRTVPLAVLQLRVKHANETSLSIMWQTPVAEWEKYIISLADRDLLLIHKSLSKDAKEFTFTDLVPGRKYMATVTSISGDLKNSSSVKGRTVPAQVTDLHVANQGMTSSLFTNWTQAQGDVEFYQVLLIHENVVIKNESISSETSRYSFHSLKSGSLYSVVVTTVSGGISSRQVVVEGRTVPSSVSGVTVNNSGRNDYLSVSWLLAPGDVDNYEVTLSHDGKVVQSLVIAKSVRECSFSSLTPGRLYTVTITTRSGKYENHSFSQERTVPDKVQGVSVSNSARSDYLRVSWVHATGDFDHYEVTIKNKNNFIQTKSIPKSENECVFVQLVPGRLYSVTVTTKSGQYEANEQGNGRTIPEPVKDLTLRNRSTEDLHVTWSGANGDVDQYEIQLLFNDMKVFPPFHLVNTATEYRFTSLTPGRQYKILVLTISGDVQQSAFIEGFTVPSAVKNIHISPNGATDSLTVNWTPGGGDVDSYTVSAFRHSQKVDSQTIPKHVFEHTFHRLEAGEQYQIMIASVSGSLKNQINVVGRTVPASVQGVIADNAYSSYSLIVSWQKAAGVAERYDILLLTENGILLRNTSEPATTKQHKFEDLTPGKKYKIQILTVSGGLFSKEAQTEGRTVPAAVTDLRITENSTRHLSFRWTASEGELSWYNIFLYNPDGNLQERAQVDPLVQSFSFQNLLQGRMYKMVIVTHSGELSNESFIFGRTVPASVSHLRGSNRNTTDSLWFNWSPASGDFDFYELILYNPNGTKKENWKDKDLTEWRFQGLVPGRKYVLWVVTHSGDLSNKVTAESRTAPSPPSLMSFADIANTSLAITWKGPPDWTDYNDFELQWLPRDALTVFNPYNNRKSEGRIVYGLRPGRSYQFNVKTVSGDSWKTYSKPIFGSVRTKPDKIQNLHCRPQNSTAIACSWIPPDSDFDGYSIECRKMDTQEVEFSRKLEKEKSLLNIMMLVPHKRYLVSIKVQSAGMTSEVVEDSTITMIDRPPPPPPHIRVNEKDVLISKSSINFTVNCSWFSDTNGAVKYFTVVVREADGSDELKPEQQHPLPSYLEYRHNASIRVYQTNYFASKCAENPNSNSKSFNIKLGAEMESLGGKCDPTQQKFCDGPLKPHTAYRISIRAFTQLFDEDLKEFTKPLYSDTFFSLPITTESEPLFGAIEGVSAGLFLIGMLVAVVALLICRQKVSHGRERPSARLSIRRDRPLSVHLNLGQKGNRKTSCPIKINQFEGHFMKLQADSNYLLSKEYEELKDVGRNQSCDIALLPENRGKNRYNNILPYDATRVKLSNVDDDPCSDYINASYIPGNNFRREYIVTQGPLPGTKDDFWKMVWEQNVHNIVMVTQCVEKGRVKCDHYWPADQDSLYYGDLILQMLSESVLPEWTIREFKICGEEQLDAHRLIRHFHYTVWPDHGVPETTQSLIQFVRTVRDYINRSPGAGPTVVHCSAGVGRTGTFIALDRILQQLDSKDSVDIYGAVHDLRLHRVHMVQTECQYVYLHQCVRDVLRARKLRSEQENPLFPIYENVNPEYHRDPVYSRH

SEQ ID NO: 11110 - protein, 1907 aa, Homo Sapiens
MLSHGAGLALWITLSLLQTGLAEPERCNFTLAESKASSHSVSIQWRILGSPCNFSLIYSSDTLGAALCPTFRIDNTTYGCNLQDLQAGTIYNFRIISLDEERTVVLQTDPLPPARFGVSKEKTTSTSLHVWWTPSSGKVTSYEVQLFDENNQKIQGVQIQESTSWNEYTFFNLTAGSKYNIAITAVSGGKRSFSVYTNGSTVPSPVKDIGISTKANSLLISWSHGSGNVERYRLMLMDKGILVHGGVVDKHATSYAFHGLTPGYLYNLTVMTEAAGLQNYRWKLVRTAPMEVSNLKVTNDGSLTSLKVKWQRPPGNVDSYNITLSHKGTIKESRVLAPWITETHFKELVPGRLYQVTVSCVSGELSAQKMAVGRTFPDKVANLEANNNGRMRSLVVSWSPPAGDWEQYRILLFNDSVVLLNITVGKEETQYVMDDTGLVPGRQYEVEVIVESGNLKNSERCQGRTVPLAVLQLRVKHANETSLSIMWQTPVAEWEKYIISLADRDLLLIHKSLSKDAKEFTFTDLVPGRKYMATVTSISGDLKNSSSVKGRTVPAQVTDLHVANQGMTSSLFTNWTQAQGDVEFYQVLLIHENVVIKNESISSETSRYSFHSLKSGSLYSVVVTTVSGGISSRQVVVEGRTVPSSVSGVTVNNSGRNDYLSVSWLLAPGDVDNYEVTLSHDGKVVQSLVIAKSVRECSFSSLTPGRLYTVTITTRSGKYENHSFSQERTVPDKVQGVSVSNSARSDYLRVSWVHATGDFDHYEVTIKNKNNFIQTKSIPKSENECVFVQLVPGRLYSVTVTTKSGQYEANEQGNGRTIPEPVKDLTLRNRSTEDLHVTWSGANGDVDQYEIQLLFNDMKVFPPFHLVNTATEYRFTSLTPGRQYKILVLTISGDVQQSAFIEGFTVPSAVKNIHISPNGATDSLTVNWTPGGGDVDSYTVSAFRHSQKVDSQTIPKHVFEHTFHRLEAGEQYQIMIASVSGSLKNQINVVGRTVPAAVTDLRITENSTRHLSFRWTASEGELSWYNIFLYNPDGNLQERAQVDPLVQSFSFQNLLQGRMYKMVIVTHSGELSNESFIFGRTVPASVSHLRGSNRNTTDSLWFNWSPASGDFDFYELILYNPNGTKKENWKDKDLTEWRFQGLVPGRKYVLWVVTHSGDLSNKVTAESRTAPSPPSLMSFADIANTSLAITWKGPPDWTDYNDFELQWLPRDALTVFNPYNNRKSEGRIVYGLRPGRSYQFNVKTVSGDSWKTYSKPIFGSVRTKPDKIQNLHCRPQNSTAIACSWIPPDSDFDGYSIECRKMDTQEVEFSRKLEKEKSLLNIMMLVPHKRYLVSIKVQSAGMTSEVVEDSTITMIDRPPPPPPHIRVNEKDVLISKSSINFTVNCSWFSDTNGAVKYFTVVVREADGSDELKPEQQHPLPSYLEYRHNASIRVYQTNYFASKCAENPNSNSKSFNIKLGAEMESLGGKCDPTQQKFCDGPLKPHTAYRISIRAFTQLFDEDLKEFTKPLYSDTFFSLPITTESEPLFGAIEGVSAGLFLIGMLVAVVALLICRQKVSHGRERPSARLSIRRDRPLSVHLNLGQKGNRKTSCPIKINQFEGHFMKLQADSNYLLSKEYEELKDVGRNQSCDIALLPENRGKNRYNNILPYDATRVKLSNVDDDPCSDYINASYIPGNNFRREYIVTQGPLPGTKDDFWKMVWEQNVHNIVMVTQCVEKGRVKCDHYWPADQDSLYYGDLILQMLSESVLPEWTIREFKICGEEQLDAHRLIRHFHYTVWPDHGVPETTQSLIQFVRTVRDYINRSPGAGPTVVHCSAGVGRTGTFIALDRILQQLDSKDSVDIYGAVHDLRLHRVHMVQTECQYVYLHQCVRDVLRARKLRSEQENPLFPIYENVNPEYHRDPVYSRH

SEQ ID NO: 11111 - protein, 1907 aa, Homo Sapiens
MLSHGAGLALWITLSLLQTGLAEPERCNFTLAESKASSHSVSIQWRILGSPCNFSLIYSSDTLGAALCPTFRIDNTTYGCNLQDLQAGTIYNFRIISLDEERTVVLQTDPLPPARFGVSKEKTTSTSLHVWWTPSSGKVTSYEVQLFDENNQKIQGVQIQESTSWNEYTFFNLTAGSKYNIAITAVSGGKRSFSVYTNGSTVPSPVKDIGISTKANSLLISWSHGSGNVERYRLMLMDKGILVHGGVVDKHATSYAFHGLTPGYLYNLTVMTEAAGLQNYRWKLVRTAPMEVSNLKVTNDGSLTSLKVKWQRPPGNVDSYNITLSHKGTIKESRVLAPWITETHFKELVPGRLYQVTVSCVSGELSAQKMAVGRTFPLAVLQLRVKHANETSLSIMWQTPVAEWEKYIISLADRDLLLIHKSLSKDAKEFTFTDLVPGRKYMATVTSISGDLKNSSSVKGRTVPAQVTDLHVANQGMTSSLFTNWTQAQGDVEFYQVLLIHENVVIKNESISSETSRYSFHSLKSGSLYSVVVTTVSGGISSRQVVVEGRTVPSSVSGVTVNNSGRNDYLSVSWLLAPGDVDNYEVTLSHDGKVVQSLVIAKSVRECSFSSLTPGRLYTVTITTRSGKYENHSFSQERTVPDKVQGVSVSNSARSDYLRVSWVHATGDFDHYEVTIKNKNNFIQTKSIPKSENECVFVQLVPGRLYSVTVTTKSGQYEANEQGNGRTIPEPVKDLTLRNRSTEDLHVTWSGANGDVDQYEIQLLFNDMKVFPPFHLVNTATEYRFTSLTPGRQYKILVLTISGDVQQSAFIEGFTVPSAVKNIHISPNGATDSLTVNWTPGGGDVDSYTVSAFRHSQKVDSQTIPKHVFEHTFHRLEAGEQYQIMIASVSGSLKNQINVVGRTVPASVQGVIADNAYSSYSLIVSWQKAAGVAERYDILLLTENGILLRNTSEPATTKQHKFEDLTPGKKYKIQILTVSGGLFSKEAQTEGRTVPAAVTDLRITENSTRHLSFRWTASEGELSWYNIFLYNPDGNLQERAQVDPLVQSFSFQNLLQGRMYKMVIVTHSGELSNESFIFGRTVPASVSHLRGSNRNTTDSLWFNWSPASGDFDFYELILYNPNGTKKENWKDKDLTEWRFQGLVPGRKYVLWVVTHSGDLSNKVTAESRTAPSPPSLMSFADIANTSLAITWKGPPDWTDYNDFELQWLPRDALTVFNPYNNRKSEGRIVYGLRPGRSYQFNVKTVSGDSWKTYSKPIFGSVRTKPDKIQNLHCRPQNSTAIACSWIPPDSDFDGYSIECRKMDTQEVEFSRKLEKEKSLLNIMMLVPHKRYLVSIKVQSAGMTSEVVEDSTITMIDRPPPPPPHIRVNEKDVLISKSSINFTVNCSWFSDTNGAVKYFTVVVREADGSDELKPEQQHPLPSYLEYRHNASIRVYQTNYFASKCAENPNSNSKSFNIKLGAEMESLGGKCDPTQQKFCDGPLKPHTAYRISIRAFTQLFDEDLKEFTKPLYSDTFFSLPITTESEPLFGAIEGVSAGLFLIGMLVAVVALLICRQKVSHGRERPSARLSIRRDRPLSVHLNLGQKGNRKTSCPIKINQFEGHFMKLQADSNYLLSKEYEELKDVGRNQSCDIALLPENRGKNRYNNILPYDATRVKLSNVDDDPCSDYINASYIPGNNFRREYIVTQGPLPGTKDDFWKMVWEQNVHNIVMVTQCVEKGRVKCDHYWPADQDSLYYGDLILQMLSESVLPEWTIREFKICGEEQLDAHRLIRHFHYTVWPDHGVPETTQSLIQFVRTVRDYINRSPGAGPTVVHCSAGVGRTGTFIALDRILQQLDSKDSVDIYGAVHDLRLHRVHMVQTECQYVYLHQCVRDVLRARKLRSEQENPLFPIYENVNPEYHRDPVYSRH

SEQ ID NO: 11112 - protein, 103 aa, Homo Sapiens
  misc_feature (1)..(1): Xaa can be any naturally occurring amino acid
XLWITLSLLQTGLAEPERCNFTLAESKASSHSVSIQWRILGSPCNFSLIYSSDTLGAALCPTFRIDNTTYGCNLQDLQAGTIYNFRIISLDEERTVVLQTGKG

SEQ ID NO: 11113 - protein, 148 aa, Homo Sapiens
MTMYLWLKLLAFGFAFLDTEVFVTGQSPTPSPTDAYLNASETTTLSPSGSAVISTTTIATTPSKPTCDEKYANITVDYLYNKETKLFTAKLNVNENVECGNNTCTNNEVHNLTECKNASVSISHNSCTAPDKTLILDVPPGVEKFQLH

SEQ ID NO: 11114 - protein, 1145 aa, Homo Sapiens
MTMYLWLKLLAFGFAFLDTEVFVTGQSPTPSPTDAYLNASETTTLSPSGSAVISTTTIATTPSKPTCDEKYANITVDYLYNKETKLFTAKLNVNENVECGNNTCTNNEVHNLTECKNASVSISHNSCTAPDKTLILDVPPGVEKFQLHDCTQVEKADTTICLKWKNIETFTCDTQNITYRFQCGNMIFDNKEIKLENLEPEHEYKCDSEILYNNHKFTNASKIIKTDFGSPGEPQIIFCRSEAAHQGVITWNPPQRSFHNFTLCYIKETEKDCLNLDKNLIKYDLQNLKPYTKYVLSLHAYIIAKVQRNGSAAMCHFTTKSAPPSQVWNMTVSMTSDNSMHVKCRPPRDRNGPHERYHLEVEAGNTLVRNESHKNCDFRVKDLQYSTDYTFKAYFHNGDYPGEPFILHHSTSYNSKALIAFLAFLIIVTSIALLVVLYKIYDLHKKRSCNLDEQQELVERDDEKQLMNVEPIHADILLETYKRKIADEGRLFLAEFQSIPRVFSKFPIKEARKPFNQNKNRYVDILPYDYNRVELSEINGDAGSNYINASYIDGFKEPRKYIAAQGPRDETVDDFWRMIWEQKATVIVMVTRCEEGNRNKCAEYWPSMEEGTRAFGDVVVKINQHKRCPDYIIQKLNIVNKKEKATGREVTHIQFTSWPDHGVPEDPHLLLKLRRRVNAFSNFFSGPIVVHCSAGVGRTGTYIGIDAMLEGLEAENKVDVYGYVVKLRRQRCLMVQVEAQYILIHQALVEYNQFGETEVNLSELHPYLHNMKKRDPPSEPSPLEAEFQRLPSYRSWRTQHIGNQEENKSKNRNSNVIPYDYNRVPLKHELEMSKESEHDSDESSDDDSDSEEPSKYINASFIMSYWKPEVMIAAQGPLKETIGDFWQMIFQRKVKVIVMLTELKHGDQEICAQYWGEGKQTYGDIEVDLKDTDKSSTYTLRVFELRHSKRKDSRTVYQYQYTNWSVEQLPAEPKELISMIQVVKQKLPQKNSSEGNKHHKSTPLLIHCRDGSQQTGIFCALLNLLESAETEEVVDIFQVVKALRKARPGMVSTFEQYQFLYDVIASTYPAQNGQVKKNNHQEDKIEFDNEVDKVKQDANCVNPLGAPEKLPEAKEQAEGSEPTSGTEGPEHSVNGPASPALNQGS

SEQ ID NO: 11115 - protein, 87 aa, Homo Sapiens
MTMYLWLKLLAFGFAFLDTEVFVTGQSPTPSPTGHLQAEEQGSQSKSPNLKSREADSSAFSWWPKAREPLTNHWSKSKSPKAEELGV

SEQ ID NO: 11116 - protein, 151 aa, Homo Sapiens
MTMYLWLKLLAFGFAFLDTEVFVTGQSPTPSPTGHLQAEEQGSQSKSPNLKSREADSSAFSWWPKAREPLTNHWSVSSVQTPHLPTHADSQTPSAGTDTQTFSGSAANAKLNPTPGSNAISDAYLNASETTTLSPSGSAVISTTTIATTPS

SEQ ID NO: 11117 - protein, 36 aa, Homo Sapiens
MTMYLWLKLLAFGFAFLDTEVFVTGQSPTPSPTGKN

SEQ ID NO: 11118 - protein, 118 aa, Homo Sapiens
MTMYLWLKLLAFGFAFLDTEVFVTGQSPTPSPTGLTTAKMPSVPLSSDPLPTHTTAFSPASTFERENDFSETTTSLSPDNTSTQVSPDSLDNASAFNTTGVSSVQTPHLPTHADSQTP

SEQ ID NO: 11119 - protein, 753 aa, Homo Sapiens
MTMYLWLKLLAFGFAFLDTEVFVTGQSPTPSPTGLTTAKMPSVPLSSDPLPTHTTAFSPASTFERENDFSETTTSLSPDNTSTQVSPDSLDNASAFNTTGVSSVQTPHLPTHADSQTPSAGTDTQTFSGSAANAKLNPTPGSNAISDAYLNASETTTLSPSGSAVISTTTIATTPSKPTCDEKYANITVDYLYNKETKLFTAKLNVNENVECGNNTCTNNEVHNLTECKNASVSISHNSCTAPDKTLILDVPPGVEKFQLHDCTQVEKADTTICLKWKNIETFTCDTQNITYRFQCGNMIFDNKEIKLENLEPEHEYKCDSEILYNNHKFTNASKIIKTDFGSPGEPQIIFCRSEAAHQGVITWNPPQRSFHNFTLCYIKETEKDCLNLDKNLIKYDLQNLKPYTKYVLSLHAYIIAKVQRNGSAAMCHFTTKSAPPSQVWNMTVSMTSDNSMHVKCRPPRDRNGPHERYHLEVEAGNTLVRNESHKNCDFRVKDLQYSTDYTFKAYFHNGDYPGEPFILHHSTSYNSKALIAFLAFLIIVTSIALLVVLYKIYDLHKKRSCNLDEQQELVERDDEKQLMNVEPIHADILLETYKRKIADEGRLFLAEFQSIPRVFSKFPIKEARKPFNQNKNRYVDILPYDYNRVELSEINGDAGSNYINASYIDGFKEPRKYIAAQGPRDETVDDFWRMIWEQKATVIVMVTRCEEGNRNKCAEYWPSMEEGTRAFGDVVVKINQHKRCPDYIIQKLNIVN

SEQ ID NO: 11120 - protein, 1306 aa, Homo Sapiens
MTMYLWLKLLAFGFAFLDTEVFVTGQSPTPSPTGLTTAKMPSVPLSSDPLPTHTTAFSPASTFERENDFSETTTSLSPDNTSTQVSPDSLDNASAFNTTGVSSVQTPHLPTHADSQTPSAGTDTQTFSGSAANAKLNPTPGSNAISDVPGERSTASTFPTDPVSPLTTTLSLAHHSSAALPARTSNTTITANTSDAYLNASETTTLSPSGSAVISTTTIATTPSKPTCDEKYANITVDYLYNKETKLFTAKLNVNENVECGNNTCTNNEVHNLTECKNASVSISHNSCTAPDKTLILDVPPGVEKFQLHDCTQVEKADTTICLKWKNIETFTCDTQNITYRFQCGNMIFDNKEIKLENLEPEHEYKCDSEILYNNHKFTNASKIIKTDFGSPGEPQIIFCRSEAAHQGVITWNPPQRSFHNFTLCYIKETEKDCLNLDKNLIKYDLQNLKPYTKYVLSLHAYIIAKVQRNGSAAMCHFTTKSAPPSQVWNMTVSMTSDNSMHVKCRPPRDRNGPHERYHLEVEAGNTLVRNESHKNCDFRVKDLQYSTDYTFKAYFHNGDYPGEPFILHHSTSYNSKALIAFLAFLIIVTSIALLVVLYKIYDLHKKRSCNLDEQQELVERDDEKQLMNVEPIHADILLETYKRKIADEGRLFLAEFQSIPRVFSKFPIKEARKPFNQNKNRYVDILPYDYNRVELSEINGDAGSNYINASYIDGFKEPRKYIAAQGPRDETVDDFWRMIWEQKATVIVMVTRCEEGNRNKCAEYWPSMEEGTRAFGDVVVKINQHKRCPDYIIQKLNIVNKKEKATGREVTHIQFTSWPDHGVPEDPHLLLKLRRRVNAFSNFFSGPIVVHCSAGVGRTGTYIGIDAMLEGLEAENKVDVYGYVVKLRRQRCLMVQVEAQYILIHQALVEYNQFGETEVNLSELHPYLHNMKKRDPPSEPSPLEAEFQRLPSYRSWRTQHIGNQEENKSKNRNSNVIPYDYNRVPLKHELEMSKESEHDSDESSDDDSDSEEPSKYINASFIMSYWKPEVMIAAQGPLKETIGDFWQMIFQRKVKVIVMLTELKHGDQEICAQYWGEGKQTYGDIEVDLKDTDKSSTYTLRVFELRHSKRKDSRTVYQYQYTNWSVEQLPAEPKELISMIQVVKQKLPQKNSSEGNKHHKSTPLLIHCRDGSQQTGIFCALLNLLESAETEEVVDIFQVVKALRKARPGMVSTFEQYQFLYDVIASTYPAQNGQVKKNNHQEDKIEFDNEVDKVKQDANCVNPLGAPEKLPEAKEQAEGSEPTSGTEGPEHSVNGPASPALNQGS

SEQ ID NO: 11121 - protein, 161 aa, Homo Sapiens
MTMYLWLKLLAFGFAFLDTEVFVTGQSPTPSPTGVSSVQTPHLPTHADSQTPSAGTDTQTFSGSAANAKLNPTPGSNAISDAYLNASETTTLSPSGSAVISTTTIATTPSKPTCDEKYANITVDYLYNKETKLFTAKLNVNENVECGNNTCTNNEVHNLTE

SEQ ID NO: 11122 - protein, 600 aa, Homo Sapiens
MTMYLWLKLLAFGFAFLDTEVFVTGQSPTPSPTGVSSVQTPHLPTHADSQTPSAGTDTQTFSGSAANAKLNPTPGSNAISDAYLNASETTTLSPSGSAVISTTTIATTPSKPTCDEKYANITVDYLYNKETKLFTAKLNVNENVECGNNTCTNNEVHNLTECKNASVSISHNSCTAPDKTLILDVPPGVEKFQLHDCTQVEKADTTICLKWKNIETFTCDTQNITYRFQCGNMIFDNKEIKLENLEPEHEYKCDSEILYNNHKFTNASKIIKTDFGSPGEPQIIFCRSEAAHQGVITWNPPQRSFHNFTLCYIKETEKDCLNLDKNLIKYDLQNLKPYTKYVLSLHAYIIAKVQRNGSAAMCHFTTKSAPPSQVWNMTVSMTSDNSMHVKCRPPRDRNGPHERYHLEVEAGNTLVRNESHKNCDFRVKDLQYSTDYTFKAYFHNGDYPGEPFILHHSTSYNSKALIAFLAFLIIVTSIALLVVLYKIYDLHKKRSCNLDEQQELVERDDEKQLMNVEPIHADILLETYKRKIADEGRLFLAEFQSIPRVFSKFPIKEARKPFNQNKNRYVDILPYDYNRVELSEINGDAGSNYINASYID

SEQ ID NO: 11123 - protein, 735 aa, Homo Sapiens
MTMYLWLKLLAFGFAFLDTEVFVTGQSPTPSPTGVSSVQTPHLPTHADSQTPSAGTDTQTFSGSAANAKLNPTPGSNAISDVPGERSTASTFPTDPVSPLTTTLSLAHHSSAALPARTSNTTITANTSDAYLNASETTTLSPSGSAVISTTTIATTPSKPTCDEKYANITVDYLYNKETKLFTAKLNVNENVECGNNTCTNNEVHNLTECKNASVSISHNSCTAPDKTLILDVPPGVEKFQLHDCTQVEKADTTICLKWKNIETFTCDTQNITYRFQCGNMIFDNKEIKLENLEPEHEYKCDSEILYNNHKFTNASKIIKTDFGSPGEPQIIFCRSEAAHQGVITWNPPQRSFHNFTLCYIKETEKDCLNLDKNLIKYDLQNLKPYTKYVLSLHAYIIAKVQRNGSAAMCHFTTKSAPPSQVWNMTVSMTSDNSMHVKCRPPRDRNGPHERYHLEVEAGNTLVRNESHKNCDFRVKDLQYSTDYTFKAYFHNGDYPGEPFILHHSTSYNSKALIAFLAFLIIVTSIALLVVLYKIYDLHKKRSCNLDEQQELVERDDEKQLMNVEPIHADILLETYKRKIADEGRLFLAEFQSIPRVFSKFPIKEARKPFNQNKNRYVDILPYDYNRVELSEINGDAGSNYINASYIDGFKEPRKYIAAQGPRDETVDDFWRMIWEQKATVIVMVTRCEEGNRNKCAEYWPSMEEGTRAFGDVVVKINQHKRCPDYIIQKLNIVN

SEQ ID NO: 11124 - protein, 206 aa, Homo Sapiens
MALPCTLGLGMLLALPGALGSGGSAEDSVGSSSVTVVLLLLLLLLLATGLALAWRRLSRDSGGYYHPARLGAALWGRTRRLLWASPPGRWLQARAELGSTDNDLERQEDEQDTDYDHVADGGLQADPGEGEQQCGEASSPEQVPVRAEEARDSDTEGDLVLGSPGPASAGGSAEALLSDLHAFAGSAAWDDSARAAGGQGLHVTAL

SEQ ID NO: 11125 - protein, 93 aa, Homo Sapiens
MVHVARLLLLLLTFFLRTDAETPPRFTRTPVDQTGVSGGVASFICQATGDPRPKIVWNKKGKKVSNQRFEVIEFDDGSGSVLRIQPLRTPRDE

SEQ ID NO: 11126 - protein, 1496 aa, Homo Sapiens
MVHVARLLLLLLTFFLRTDAETPPRFTRTPVDQTGVSGGVASFICQATGDPRPKIVWNKKGKKVSNQRFEVIEFDDGSGSVLRIQPLRTPRDEAIYECVASNNVGEISVSTRLTVLREDQIPRGFPTIDMGPQLKVVERTRTATMLCAASGNPDPEITWFKDFLPVDTSNNNGRIKQLRSESIGALQIEQSEESDQGKYECVATNSAGTRYSAPANLYVRELREVRRVPPRFSIPPTNHEIMPGGSVNITCVAVGSPMPYVKWMLGAEDLTPEDDMPIGRNVLELNDVRQSANYTCVAMSTLGVIEAIAQITVKALPKPPGTPVVTESTATSITLTWDSGNPEPVSYYIIQHKPKNSEELYKEIDGVATTRYSVAGLSPYSDYEFRVVAVNNIGRGPPSEPVLTQTSEQAPSSAPRDVQARMLSSTTILVQWKEPEEPNGQIQGYRVYYTMDPTQHVNNWMKHNVADSQITTIGNLVPQKTYSVKVLAFTSIGDGPLSSDIQVITQTGVPGQPLNFKAEPESETSILLSWTPPRSDTIANYELVYKDGEHGEEQRITIEPGTSYRLQGLKPNSLYYFRLAARSPQGLGASTAEISARTMQSTVFAKNFHVKAVMKTSVLLSWEIPENYNSAMPFKILYDDGKMVEEVDGRATQKLIVNLKPEKSYSFVLTNRGNSAGGLQHRVTAKTAPDVLRTKPAFIGKTNLDGMITVQLPEVPANENIKGYYIIIVPLKKSRGKFIKPWESPDEMELDELLKEISRKRRSIRYGREVELKPYIAAHFDVLPTEFTLGDDKHYGGFTNKQLQSGQEYVFFVLAVMEHAESKMYATSPYSDPVVSMDLDPQPITDEEEGLIWVVGPVLAVVFIICIVIAILLYKRKRAESDSRKSSIPNNKEIPSHHPTDPVELRRLNFQTPGMASHPPIPILELADHIERLKANDNLKFSQEYESIDPGQQFTWEHSNLEVNKPKNRYANVIAYDHSRVLLSAIEGIPGSDYVNANYIDGYRKQNAYIATQGSLPETFGDFWRMIWEQRSATVVMMTKLEERSRVKCDQYWPSRGTETHGLVQVTLLDTVELATYCVRTFALYKNGSSEKREVRQFQFTAWPDHGVPEHPTPFLAFLRRVKTCNPPDAGPMVVHCSAGVGRTGCFIVIDAMLERIKHEKTVDIYGHVTLMRAQRNYMVQTEDQYIFIHDALLEAVTCGNTEVPARNLYAYIQKLTQIETGENVTGMELEFKRLASSKAHTSRFISANLPCNKFKNRLVNIMPYESTRVCLQPIRGVEGSDYINASFIDGYRQQKAYIATQGPLAETTEDFWRMLWEHNSTIVVMLTKLREMGREKCHQYWPAERSARYQYFVVDPMAEYNMPQYILREFKVTDARDGQSRTVRQFQFTDWPEQGVPKSGEGFIDFIGQVHKTKEQFGQDGPISVHCSAGVGRTGVFITLSIVLERMRYEGVVDIFQTVKMLRTQRPAMVQTEDQYQFSYRAALEYLGSFDHYAT

SEQ ID NO: 11127 - protein, 1505 aa, Homo Sapiens
MVHVARLLLLLLTFFLRTDAETPPRFTRTPVDQTGVSGGVASFICQATGDPRPKIVWNKKGKKVSNQRFEVIEFDDGSGSVLRIQPLRTPRDEAIYECVASNNVGEISVSTRLTVLREDQIPRGFPTIDMGPQLKVVERTRTATMLCAASGNPDPEITWFKDFLPVDTSNNNGRIKQLRSESIGALQIEQSEESDQGKYECVATNSAGTRYSAPANLYVRVRRVPPRFSIPPTNHEIMPGGSVNITCVAVGSPMPYVKWMLGAEDLTPEDDMPIGRNVLELNDVRQSANYTCVAMSTLGVIEAIAQITVKALPKPPGTPVVTESTATSITLTWDSGNPEPVSYYIIQHKPKNSEELYKEIDGVATTRYSVAGLSPYSDYEFRVVAVNNIGRGPPSEPVLTQTSEQAPSSAPRDVQARMLSSTTILVQWKEPEEPNGQIQGYRVYYTMDPTQHVNNWMKHNVADSQITTIGNLVPQKTYSVKVLAFTSIGDGPLSSDIQVITQTGVPGQPLNFKAEPESETSILLSWTPPRSDTIANYELVYKDGEHGEEQRITIEPGTSYRLQGLKPNSLYYFRLAARSPQGLGASTAEISARTMQSMFAKNFHVKAVMKTSVLLSWEIPENYNSAMPFKILYDDGKMVEEVDGRATQKLIVNLKPEKSYSFVLTNRGNSAGGLQHRVTAKTAPDVLRTKPAFIGKTNLDGMITVQLPEVPANENIKGYYIIIVPLKKSRGKFIKPWESPDEMELDELLKEISRKRRSIRYGREVELKPYIAAHFDVLPTEFTLGDDKHYGGFTNKQLQSGQEYVFFVLAVMEHAESKMYATSPYSDPVVSMDLDPQPITDEEEGLIWVVGPVLAVVFIICIVIAILLYKRKRAESDSRKSSIPNNKEIPSHHPTDPVELRRLNFQTPGSDDSGYPGNLHSSSMASHPPIPILELADHIERLKANDNLKFSQEYESIDPGQQFTWEHSNLEVNKPKNRYANVIAYDHSRVLLSAIEGIPGSDYVNANYIDGYRKQNAYIATQGSLPETFGDFWRMIWEQRSATVVMMTKLEERSRVKCDQYWPSRGTETHGLVQVTLLDTVELATYCVRTFALYKNGSSEKREVRQFQFTAWPDHGVPEHPTPFLAFLRRVKTCNPPDAGPMVVHCSAGVGRTGCFIVIDAMLERIKHEKTVDIYGHVTLMRAQRNYMVQTEDQYIFIHDALLEAVTCGNTEVPARNLYAYIQKLTQIETGENVTGMELEFKRLASSKAHTSRFISANLPCNKFKNRLVNIMPYESTRVCLQPIRGVEGSDYINASFIDGYRQQKAYIATQGPLAETTEDFWRMLWEHNSTIVVMLTKLREMGREKCHQYWPAERSARYQYFVVDPMAEYNMPQYILREFKVTDARDGQSRTVRQFQFTDWPEQGVPKSGEGFIDFIGQVHKTKEQFGQDGPISVHCSAGVGRTGVFITLSIVLERMRYEGVVDIFQTVKMLRTQRPAMVQTEDQYQFSYRAALEYLGSFDHYAT

SEQ ID NO: 11128 - protein, 1506 aa, Homo Sapiens
MVHVARLLLLLLTFFLRTDAETPPRFTRTPVDQTGVSGGVASFICQATGDPRPKIVWNKKGKKVSNQRFEVIEFDDGSGSVLRIQPLRTPRDEAIYECVASNNVGEISVSTRLTVLREDQIPRGFPTIDMGPQLKVVERTRTATMLCAASGNPDPEITWFKDFLPVDTSNNNGRIKQLRSESIGGTPIRGALQIEQSEESDQGKYECVATNSAGTRYSAPANLYVRELREVRRVPPRFSIPPTNHEIMPGGSVNITCVAVGSPMPYVKWMLGAEDLTPEDDMPIGRNVLELNDVRQSANYTCVAMSTLGVIEAIAQITVKALPKPPGTPVVTESTATSITLTWDSGNPEPVSYYIIQHKPKNSEELYKEIDGVATTRYSVAGLSPYSDYEFRVVAVNNIGRGPPSEPVLTQTSEQAPSSAPRDVQARMLSSTTILVQWKEPEEPNGQIQGYRVYYTMDPTQHVNNWMKHNVADSQITTIGNLVPQKTYSVKVLAFTSIGDGPLSSDIQVITQTGVPGQPLNFKAEPESETSILLSWTPPRSDTIANYELVYKDGEHGEEQRITIEPGTSYRLQGLKPNSLYYFRLAARSPQGLGASTAEISARTMQSMFAKNFHVKAVMKTSVLLSWEIPENYNSAMPFKILYDDGKMVEEVDGRATQKLIVNLKPEKSYSFVLTNRGNSAGGLQHRVTAKTAPDVLRTKPAFIGKTNLDGMITVQLPEVPANENIKGYYIIIVPLKKSRGKFIKPWESPDEMELDELLKEISRKRRSIRYGREVELKPYIAAHFDVLPTEFTLGDDKHYGGFTNKQLQSGQEYVFFVLAVMEHAESKMYATSPYSDPVVSMDLDPQPITDEEEGLIWVVGPVLAVVFIICIVIAILLYKSSKPDRKRAESDSRKSSIPNNKEIPSHHPTDPVELRRLNFQTPGMASHPPIPILELADHIERLKANDNLKFSQEYESIDPGQQFTWEHSNLEVNKPKNRYANVIAYDHSRVLLSAIEGIPGSDYVNANYIDGYRKQNAYIATQGSLPETFGDFWRMIWEQRSATVVMMTKLEERSRVKCDQYWPSRGTETHGLVQVTLLDTVELATYCVRTFALYKNGSSEKREVRQFQFTAWPDHGVPEHPTPFLAFLRRVKTCNPPDAGPMVVHCSAGVGRTGCFIVIDAMLERIKHEKTVDIYGHVTLMRAQRNYMVQTEDQYIFIHDALLEAVTCGNTEVPARNLYAYIQKLTQIETGENVTGMELEFKRLASSKAHTSRFISANLPCNKFKNRLVNIMPYESTRVCLQPIRGVEGSDYINASFIDGYRQQKAYIATQGPLAETTEDFWRMLWEHNSTIVVMLTKLREMGREKCHQYWPAERSARYQYFVVDPMAEYNMPQYILREFKVTDARDGQSRTVRQFQFTDWPEQGVPKSGEGFIDFIGQVHKTKEQFGQDGPISVHCSAGVGRTGVFITLSIVLERMRYEGVVDIFQTVKMLRTQRPAMVQTEDQYQFSYRAALEYLGSFDHYAT

SEQ ID NO: 11129 - protein, 1912 aa, Homo Sapiens
MVHVARLLLLLLTFFLRTDAETPPRFTRTPVDQTGVSGGVASFICQATGDPRPKIVWNKKGKKVSNQRFEVIEFDDGSGSVLRIQPLRTPRDEAIYECVASNNVGEISVSTRLTVLREDQIPRGFPTIDMGPQLKVVERTRTATMLCAASGNPDPEITWFKDFLPVDTSNNNGRIKQLRSESIGGTPIRGALQIEQSEESDQGKYECVATNSAGTRYSAPANLYVRELREVRRVPPRFSIPPTNHEIMPGGSVNITCVAVGSPMPYVKWMLGAEDLTPEDDMPIGRNVLELNDVRQSANYTCVAMSTLGVIEAIAQITVKALPKPPGTPVVTESTATSITLTWDSGNPEPVSYYIIQHKPKNSEELYKEIDGVATTRYSVAGLSPYSDYEFRVVAVNNIGRGPPSEPVLTQTSEQAPSSAPRDVQARMLSSTTILVQWKEPEEPNGQIQGYRVYYTMDPTQHVNNWMKHNVADSQITTIGNLVPQKTYSVKVLAFTSIGDGPLSSDIQVITQTGVPGQPLNFKAEPESETSILLSWTPPRSDTIANYELVYKDGEHGEEQRITIEPGTSYRLQGLKPNSLYYFRLAARSPQGLGASTAEISARTMQSKPSAPPQDISCTSPSSTSILVSWQPPPVEKQNGIITEYSIKYTAVDGEDDKPHEILGIPSDTTKYLLEQLEKWTEYRITVTAHTDVGPGPESLSVLIRTNEDVPSGPPRKVEVEAVNSTSVKVSWRSPVPNKQHGQIRGYQVHYVRMENGEPKGQPMLKDVMLADAQWEFDDTTEHDMIISGLQPETSYSLTVTAYTTKGDGARSKPKLVSTTGAVPGKPRLVINHTQMNTALIQWHPPVDTFGPLQGYRLKFGRKDMEPLTTLEFSEKEDHFTATDIHKGASYVFRLSARNKVGFGEEMVKEISIPEEVPTGFPQNLHSEGTTSTSVQLSWQPPVLAERNGIITKYTLLYRDINIPLLPMEQLIVPADTTMTLTGLKPDTTYDVKVRAHTSKGPGPYSPSVQFRTLPVDQVFAKNFHVKAVMKTSVLLSWEIPENYNSAMPFKILYDDGKMVEEVDGRATQKLIVNLKPEKSYSFVLTNRGNSAGGLQHRVTAKTAPDVLRTKPAFIGKTNLDGMITVQLPEVPANENIKGYYIIIVPLKKSRGKFIKPWESPDEMELDELLKEISRKRRSIRYGREVELKPYIAAHFDVLPTEFTLGDDKHYGGFTNKQLQSGQEYVFFVLAVMEHAESKMYATSPYSDPVVSMDLDPQPITDEEEGLIWVVGPVLAVVFIICIVIAILLYKRKRAESDSRKSSIPNNKEIPSHHPTDPVELRRLNFQTPGMASHPPIPILELADHIERLKANDNLKFSQEYESIDPGQQFTWEHSNLEVNKPKNRYANVIAYDHSRVLLSAIEGIPGSDYVNANYIDGYRKQNAYIATQGSLPETFGDFWRMIWEQRSATVVMMTKLEERSRVKCDQYWPSRGTETHGLVQVTLLDTVELATYCVRTFALYKNGSSEKREVRQFQFTAWPDHGVPEHPTPFLAFLRRVKTCNPPDAGPMVVHCSAGVGRTGCFIVIDAMLERIKHEKTVDIYGHVTLMRAQRNYMVQTEDQYIFIHDALLEAVTCGNTEVPARNLYAYIQKLTQIETGENVTGMELEFKRLASSKAHTSRFISANLPCNKFKNRLVNIMPYESTRVCLQPIRGVEGSDYINASFIDGYRQQKAYIATQGPLAETTEDFWRMLWEHNSTIVVMLTKLREMGREKCHQYWPAERSARYQYFVVDPMAEYNMPQYILREFKVTDARDGQSRTVRQFQFTDWPEQGVPKSGEGFIDFIGQVHKTKEQFGQDGPISVHCSAGVGRTGVFITLSIVLERMRYEGVVDIFQTVKMLRTQRPAMVQTEDQYQFSYRAALEYLGSFDHYAT

SEQ ID NO: 11130 - protein, 1912 aa, Homo Sapiens; identical to SEQ ID NO: 11129

SEQ ID NO: 11131 - protein, 1912 aa, Homo Sapiens; identical to SEQ ID NO: 11129

SEQ ID NO: 11132 - protein, 1505 aa, Homo Sapiens
MVHVARLLLLLLTFFLRTDAETPPRFTRTPVDQTGVSGGVASFICQATGDPRPKIVWNKKGKKVSNQRFEVIEFDDGSGSVLRIQPLRTPRDEAIYECVASNNVGEISVSTRLTVLREDQIPRGFPTIDMGPQLKVVERTRTATMLCAASGNPDPEITWFKDFLPVDTSNNNGRIKQLRSESIGGTPIRGALQIEQSEESDQGKYECVATNSAGTRYSAPANLYVRELREVRRVPPRFSIPPTNHEIMPGGSVNITCVAVGSPMPYVKWMLGAEDLTPEDDMPIGRNVLELNDVRQSANYTCVAMSTLGVIEAIAQITVKALPKPPGTPVVTESTATSITLTWDSGNPEPVSYYIIQHKPKNSEELYKEIDGVATTRYSVAGLSPYSDYEFRVVAVNNIGRGPPSEPVLTQTSEQAPSSAPRDVQARMLSSTTILVQWKEPEEPNGQIQGYRVYYTMDPTQHVNNWMKHNVADSQITTIGNLVPQKTYSVKVLAFTSIGDGPLSSDIQVITQTGVPGQPLNFKAEPESETSILLSWTPPRSDTIANYELVYKDGEHGEEQRITIEPGTSYRLQGLKPNSLYYFRLAARSPQGLGASTAEISARTMQSMFAKNFHVKAVMKTSVLLSWEIPENYNSAMPFKILYDDGKMVEEVDGRATQKLIVNLKPEKSYSFVLTNRGNSAGGLQHRVTAKTAPDVLRTKPAFIGKTNLDGMITVQLPEVPANENIKGYYIIIVPLKKSRGKFIKPWESPDEMELDELLKEISRKRRSIRYGREVELKPYIAAHFDVLPTEFTLGDDKHYGGFTNKQLQSGQEYVFFVLAVMEHAESKMYATSPYSDPVVSMDLDPQPITDEEEGLIWVVGPVLAVVFIICIVIAILLYKSKPDRKRAESDSRKSSIPNNKEIPSHHPTDPVELRRLNFQTPGMASHPPIPILELADHIERLKANDNLKFSQEYESIDPGQQFTWEHSNLEVNKPKNRYANVIAYDHSRVLLSAIEGIPGSDYVNANYIDGYRKQNAYIATQGSLPETFGDFWRMIWEQRSATVVMMTKLEERSRVKCDQYWPSRGTETHGLVQVTLLDTVELATYCVRTFALYKNGSSEKREVRQFQFTAWPDHGVPEHPTPFLAFLRRVKTCNPPDAGPMVVHCSAGVGRTGCFIVIDAMLERIKHEKTVDIYGHVTLMRAQRNYMVQTEDQYIFIHDALLEAVTCGNTEVPARNLYAYIQKLTQIETGENVTGMELEFKRLASSKAHTSRFISANLPCNKFKNRLVNIMPYESTRVCLQPIRGVEGSDYINASFIDGYRQQKAYIATQGPLAETTEDFWRMLWEHNSTIVVMLTKLREMGREKCHQYWPAERSARYQYFVVDPMAEYNMPQYILREFKVTDARDGQSRTVRQFQFTDWPEQGVPKSGEGFIDFIGQVHKTKEQFGQDGPISVHCSAGVGRTGVFITLSIVLERMRYEGVVDIFQTVKMLRTQRPAMVQTEDQYQFSYRAALEYLGSFDHYAT

SEQ ID NO: 11133 - protein, 1502 aa, Homo Sapiens
MVHVARLLLLLLTFFLRTDAETPPRFTRTPVDQTGVSGGVASFICQATGDPRPKIVWNKKGKKVSNQRFEVIEFDDGSGSVLRIQPLRTPRDEAIYECVASNNVGEISVSTRLTVLREDQIPRGFPTIDMGPQLKVVERTRTATMLCAASGNPDPEITWFKDFLPVDTSNNNGRIKQLRSGGTPIRGALQIEQSEESDQGKYECVATNSAGTRYSAPANLYVRELREVRRVPPRFSIPPTNHEIMPGGSVNITCVAVGSPMPYVKWMLGAEDLTPEDDMPIGRNVLELNDVRQSANYTCVAMSTLGVIEAIAQITVKALPKPPGTPVVTESTATSITLTWDSGNPEPVSYYIIQHKPKNSEELYKEIDGVATTRYSVAGLSPYSDYEFRVVAVNNIGRGPPSEPVLTQTSEQAPSSAPRDVQARMLSSTTILVQWKEPEEPNGQIQGYRVYYTMDPTQHVNNWMKHNVADSQITTIGNLVPQKTYSVKVLAFTSIGDGPLSSDIQVITQTGVPGQPLNFKAEPESETSILLSWTPPRSDTIANYELVYKDGEHGEEQRITIEPGTSYRLQGLKPNSLYYFRLAARSPQGLGASTAEISARTMQSMFAKNFHVKAVMKTSVLLSWEIPENYNSAMPFKILYDDGKMVEEVDGRATQKLIVNLKPEKSYSFVLTNRGNSAGGLQHRVTAKTAPDVLRTKPAFIGKTNLDGMITVQLPEVPANENIKGYYIIIVPLKKSRGKFIKPWESPDEMELDELLKEISRKRRSIRYGREVELKPYIAAHFDVLPTEFTLGDDKHYGGFTNKQLQSGQEYVFFVLAVMEHAESKMYATSPYSDPVVSMDLDPQPITDEEEGLIWVVGPVLAVVFIICIVIAILLYKSKPDRKRAESDSRKSSIPNNKEIPSHHPTDPVELRRLNFQTPGMASHPPIPILELADHIERLKANDNLKFSQEYESIDPGQQFTWEHSNLEVNKPKNRYANVIAYDHSRVLLSAIEGIPGSDYVNANYIDGYRKQNAYIATQGSLPETFGDFWRMIWEQRSATVVMMTKLEERSRVKCDQYWPSRGTETHGLVQVTLLDTVELATYCVRTFALYKNGSSEKREVRQFQFTAWPDHGVPEHPTPFLAFLRRVKTCNPPDAGPMVVHCSAGVGRTGCFIVIDAMLERIKHEKTVDIYGHVTLMRAQRNYMVQTEDQYIFIHDALLEAVTCGNTEVPARNLYAYIQKLTQIETGENVTGMELEFKRLASSKAHTSRFISANLPCNKFKNRLVNIMPYESTRVCLQPIRGVEGSDYINASFIDGYRQQKAYIATQGPLAETTEDFWRMLWEHNSTIVVMLTKLREMGREKCHQYWPAERSARYQYFVVDPMAEYNMPQYILREFKVTDARDGQSRTVRQFQFTDWPEQGVPKSGEGFIDFIGQVHKTKEQFGQDGPISVHCSAGVGRTGVFITLSIVLERMRYEGVVDIFQTVKMLRTQRPAMVQTEDQYQFSYRAALEYLGSFDHYAT

SEQ ID NO: 11134 - protein, 202 aa, Homo Sapiens
MVHVARLLLLLLTFFLRTDAETPPRFTRTPVDQTGVSGGVASFICQATGDPRPKIVWNKKGKKVSNQRFEVIEFDDGSGSVLRIQPLRTPRDEAIYECVASNNVGEISVSTRLTVLREDQIPRGFPTIDMGPQLKVVERTRTATMLCAASGNPDPEITWFKDFLPVDTSNNNGRIKQLRSGTDFSPSSLSLLLNGWSMFVMS

SEQ ID NO: 11135 - protein, 1505 aa, Homo Sapiens [sequence omitted]

SEQ ID NO: 11136 - protein, 297 aa, Homo Sapiens
  misc_feature (1)..(1): Xaa can be any naturally occurring amino acid
XAGGLQHRVTAKTAPDVLRTKPAFIGKTNLDGMITVQLPEVPANENIKGYYIIIVPLKKSRGKFIKPWESPDEMELDELLKEISRKRRSIRYGREVELKPYIAAHFDVLPTEFTLGDDKHYGGFTNKQLQSGQEYVFFVLAVMEHAESKMYATSPYSDPVVSMDLDPQPITDEEEGLIWVVGPVLAVVFIICIVIAILLYKSKPDRKRAESDSRKSSIPNNKEIPSHHPTDPVELRRLNFQTPALSSNSVPYASLIGSVSSLSSQTTTQSIYDNNSLPRSARKGMASHPPIPILELA

SEQ ID NO: 11137 - protein, 262 aa, Homo Sapiens
MAPEPAPGRTMVPLVPALVMLGLVAGAHGDSKPVFIKVPEDQTGLSGGVASFVCQATGEPKPRITWMKKGKKVSSQRFEVIEFDDGAGSVLRIQPLRVQRDEAIYECTATNSLGEINTSAKLSVLEEEQLPPGFPSIDMGPQLKVVEKARTATMLCAAGGNPDPEISWFKDFLPVDPATSNGRIKQLRSGALQIESSEESDQGKYECVATNSAGTRYSAPANLYVRGLAAWARSPMGIWSHPIRLLGVCACVCAHTGTLICV

SEQ ID NO: 11138 - protein, 262 aa, Homo Sapiens; identical to SEQ ID NO: 11137

SEQ ID NO: 11139 - protein, 1907 aa, Homo Sapiens
MAPEPAPGRTMVPLVPALVMLGLVAGAHGDSKPVFIKVPEDQTGLSGGVASFVCQATGEPKPRITWMKKGKKVSSQRFEVIEFDDGAGSVLRIQPLRVQRDEAIYECTATNSLGEINTSAKLSVLEEEQLPPGFPSIDMGPQLKVVEKARTATMLCAAGGNPDPEISWFKDFLPVDPATSNGRIKQLRSGALQIESSEESDQGKYECVATNSAGTRYSAPANLYVRVRRVAPRFSIPPSSQEVMPGGSVNLTCVAVGAPMPYVKWMMGAEELTKEDEMPVGRNVLELSNVVRSANYTCVAISSLGMIEATAQVTVKALPKPPIDLVVTETTATSVTLTWDSGNSEPVTYYGIQYRAAGTEGPFQEVDGVATTRYSIGGLSPFSEYAFRVLAVNSIGRGPPSEAVRARTGEQAPSSPPRRVQARMLSASTMLVQWEPPEEPNGLVRGYRVYYTPDSRRPPNAWHKHNTDAGLLTTVGSLLPGITYSLRVLAFTAVGDGPPSPTIQVKTQQGVPAQPADFQAEVESDTRIQLSWLLPPQERIIMYELVYWAAEDEDQQHKVTFDPTSSYTLEDLKPDTLYRFQLAARSDMGVGVFTPTIEARTAQSTPSAPPQKVMCVSMGSTTVRVSWVPPPADSRNGVITQYSVAYEAVDGEDRGRHVVDGISREHSSWDLVGLEKWTEYRVWVRAHTDVGPGPESSPVLVRTDEDVPSGPPRKVEVEPLNSTAVHVYWKLPVPSKQHGQIRGYQVTYVRLENGEPRGLPIIQDVMLAEAQWRPEESEDYETTISGLTPETTYSVTVAAYTTKGDGARSKPKIVTTTGAVPGRPTMMISTTAMNTALLQWHPPKELPGELLGYRLQYCRADEARPNTIDFGKDDQHFTVTGLHKGTTYIFRLAAKNRAGLGEEFEKEIRTPEDLPSGFPQNLHVTGLTTSTTELAWDPPVLAERNGRIISYTVVFRDINSQQELQNITTDTRFTLTGLKPDTTYDIKVRAWTSKGSGPLSPSIQSRTMPVEQVFAKNFRVAAAMKTSVLLSWEVPDSYKSAVPFKILYNGQSVEVDGHSMRKLIADLQPNTEYSFVLMNRGSSAGGLQHLVSIRTAPDLLPHKPLPASAYIEDGRFDLSMPHVQDPSLVRWFYIVVVPIDRVGGSMLTPRWSTPEELELDELLEAIEQGGEEQRRRRRQAERLKPYVAAQLDVLPETFTLGDKKNYRGFYNRPLSPDLSYQCFVLASLKEPMDQKRYASSPYSDEIVVQVTPAQQQEEPEMLWVTGPVLAVILIILIVIAILLFKRKRTHSPSSKDEQSIGLKDSLLAHSSDPVEMRRLNYQTPGMRDHPPIPITDLADNIERLKANDGLKFSQEYESIDPGQQFTWENSNLEVNKPKNRYANVIAYDHSRVILTSIDGVPGSDYINANYIDGYRKQNAYIATQGPLPETMGDFWRMVWEQRTATVVMMTRLEEKSRVKCDQYWPARGTETCGLIQVTLLDTVELATYTVRTFALHKSGSSEKRELRQFQFMAWPDHGVPEYPTPILAFLRRVKACNPLDAGPMVVHCSAGVGRTGCFIVIDAMLERMKHEKTVDIYGHVTCMRSQRNYMVQTEDQYVFIHEALLEAATCGHTEVPARNLYAHIQKLGQVPPGESVTAMELEFKLLASSKAHTSRFISANLPCNKFKNRLVNIMPYELTRVCLQPIRGVEGSDYINASFLDGYRQQKAYIATQGPLAESTEDFWRMLWEHNSTIIVMLTKLREMGREKCHQYWPAERSARYQYFVVDPMAEYNMPQYILREFKVTDARDGQSRTIRQFQFTDWPEQGVPKTGEGFIDFIGQVHKTKEQFGQDGPITVHCSAGVGRTGVFITLSIVLERMRYEGVVDMFQTVKTLRTQRPAMVQTEDQYQLCYRAALEYLGSFDHYAT

SEQ ID NO: 11140 - protein, 1898 aa, Homo Sapiens
MAPEPAPGRTMVPLVPALVMLGLVAGAHGDSKPVFIKVPEDQTGLSGGVASFVCQATGEPKPRITWMKKGKKVSSQRFEVIEFDDGAGSVLRIQPLRVQRDEAIYECTATNSLGEINTSAKLSVLEEEQLPPGFPSIDMGPQLKVVEKARTATMLCAAGGNPDPEISWFKDFLPVDPATSNGRIKQLRSGALQIESSEESDQGKYECVATNSAGTRYSAPANLYVRVRRVAPRFSIPPSSQEVMPGGSVNLTCVAVGAPMPYVKWMMGAEELTKEDEMPVGRNVLELSNVVRSANYTCVAISSLGMIEATAQVTVKALPKPPIDLVVTETTATSVTLTWDSGNSEPVTYYGIQYRAAGTEGPFQEVDGVATTRYSIGGLSPFSEYAFRVLAVNSIGRGPPSEAVRARTGEQAPSSPPRRVQARMLSASTMLVQWEPPEEPNGLVRGYRVYYTPDSRRPPNAWHKHNTDAGLLTTVGSLLPGITYSLRVLAFTAVGDGPPSPTIQVKTQQGVPAQPADFQAEVESDTRIQLSWLLPPQERIIMYELVYWAAEDEDQQHKVTFDPTSSYTLEDLKPDTLYRFQLAARSDMGVGVFTPTIEARTAQSTPSAPPQKVMCVSMGSTTVRVSWVPPPADSRNGVITQYSVAYEAVDGEDRGRHVVDGISREHSSWDLVGLEKWTEYRVWVRAHTDVGPGPESSPVLVRTDEDVPSGPPRKVEVEPLNSTAVHVYWKLPVPSKQHGQIRGYQVTYVRLENGEPRGLPIIQDVMLAEAQETTISGLTPETTYSVTVAAYTTKGDGARSKPKIVTTTGAVPGRPTMMISTTAMNTALLQWHPPKELPGELLGYRLQYCRADEARPNTIDFGKDDQHFTVTGLHKGTTYIFRLAAKNRAGLGEEFEKEIRTPEDLPSGFPQNLHVTGLTTSTTELAWDPPVLAERNGRIISYTVVFRDINSQQELQNITTDTRFTLTGLKPDTTYDIKVRAWTSKGSGPLSPSIQSRTMPVEQVFAKNFRVAAAMKTSVLLSWEVPDSYKSAVPFKILYNGQSVEVDGHSMRKLIADLQPNTEYSFVLMNRGSSAGGLQHLVSIRTAPDLLPHKPLPASAYIEDGRFDLSMPHVQDPSLVRWFYIVVVPIDRVGGSMLTPRWSTPEELELDELLEAIEQGGEEQRRRRRQAERLKPYVAAQLDVLPETFTLGDKKNYRGFYNRPLSPDLSYQCFVLASLKEPMDQKRYASSPYSDEIVVQVTPAQQQEEPEMLWVTGPVLAVILIILIVIAILLFKRKRTHSPSSKDEQSIGLKDSLLAHSSDPVEMRRLNYQTPGMRDHPPIPITDLADNIERLKANDGLKFSQEYESIDPGQQFTWENSNLEVNKPKNRYANVIAYDHSRVILTSIDGVPGSDYINANYIDGYRKQNAYIATQGPLPETMGDFWRMVWEQRTATVVMMTRLEEKSRVKCDQYWPARGTETCGLIQVTLLDTVELATYTVRTFALHKSGSSEKRELRQFQFMAWPDHGVPEYPTPILAFLRRVKACNPLDAGPMVVHCSAGVGRTGCFIVIDAMLERMKHEKTVDIYGHVTCMRSQRNYMVQTEDQYVFIHEALLEAATCGHTEVPARNLYAHIQKLGQVPPGESVTAMELEFKLLASSKAHTSRFISANLPCNKFKNRLVNIMPYELTRVCLQPIRGVEGSDYINASFLDGYRQQKAYIATQGPLAESTEDFWRMLWEHNSTIIVMLTKLREMGREKCHQYWPAERSARYQYFVVDPMAEYNMPQYILREFKVTDARDGQSRTIRQFQFTDWPEQGVPKTGEGFIDFIGQVHKTKEQFGQDGPITVHCSAGVGRTGVFITLSIVLERMRYEGVVDMFQTVKTLRTQRPAMVQTEDQYQLCYRAALEYLGSFDHYAT

SEQ ID NO: 11141 - protein, 979 aa, Homo Sapiens
TYVRLENGEPRGLPIIQDVMLAEAQWRPEESEDYETTISGLTPETTYSVTVAAYTTKGDGARSKPKIVTTTGAVFAKNFRVAAAMKTSVLLSWEVPDSYKSAVPFKILYNGQSVEVDGHSMRKLIADLQPNTEYSFVLMNRGSSAGGLQHLVSIRTAPDLLPHKPLPASAYIEDGRFDLSMPHVQDPSLVRWFYIVVVPIDRVGGSMLTPRWSTPEELELDELLEAIEQGGEEQRRRRRQAERLKPYVAAQLDVLPETFTLGDKKNYRGFYNRPLSPDLSYQCFVLASLKEPMDQKRYASSPYSDEIVVQVTPAQQQEEPEMLWVTGPVLAVILIILIVIAILLFKRKRTHSPSSKDEQSIGLKDSLLAHSSDPVEMRRLNYQTPGSSVPSCPNTSSMRDHPPIPITDLADNIERLKANDGLKFSQEYESIDPGQQFTWENSNLEVNKPKNRYANVIAYDHSRVILTSIDGVPGSDYINANYIDGYRKQNAYIATQGPLPETMGDFWRMVWEQRTATVVMMTRLEEKSRVKCDQYWPARGTETCGLIQVTLLDTVELATYTVRTFALHKSGSSEKRELRQFQFMAWPDHGVPEYPTPILAFLRRVKACNPLDAGPMVVHCSAGVGRTGCFIVIDAMLERMKHEKTVDIYGHVTCMRSQRNYMVQTEDQYVFIHEALLEAATCGHTEVPARNLYAHIQKLGQVPPGESVTAMELEFKLLASSKAHTSRFISANLPCNKFKNRLVNIMPYELTRVCLQPIRGVEGSDYINASFLDGYRQQKAYIATQGPLAESTEDFWRMLWEHNSTIIVMLTKLREMGREKCHQYWPAERSARYQYFVVDPMAEYNMPQYILREFKVTDARDGQSRTIRQFQFTDWPEQGVPKTGEGFIDFIGQVHKTKEQFGQDGPITVHCSAGVGRTGVFITLSIVLERMRYEGVVDMFQTVKTLRTQRPAMVQTEDQYQLCYRAALEYLGSFDHYAT

SEQ ID NO: 11142 - protein, 1553 aa, Homo Sapiens
  misc_feature (1)..(1): Xaa can be any naturally occurring amino acid
XEPVTYYGIQYRAAGTEGPFQEVDGVATTRYSIGGLSPFSEYAFRVLAVNSIGRGPPSEAVRARTGEQAPSSPPRRVQARMLSASTMLVQWEPPEEPNGLVRGYRVYYTPDSRRPPNAWHKHNTDAGLLTTVGSLLPGITYSLRVLAFTAVGDGPPSPTIQVKTQQGVPAQPADFQAEVESDTRIQLSWLLPPQERIIMYELVYWAAEDEDQQHKVTFDPTSSYTLEDLKPDTLYRFQLAARSDMGVGVFTPTIEARTAQSTPSAPPQKVMCVSMGSTTVRVSWVPPPADSRNGVITQYSVAYEAVDGEDRGRHVVDGISREHSSWDLVGLEKWTEYRVWVRAHTDVGPGPESSPVLVRTDEDVPSGPPRKVEVEPLNSTAVHVYWKLPVPSKQHGQIRGYQVTYVRLENGEPRGLPIIQDVMLAEAQETTISGLTPETTYSVTVAAYTTKGDGARSKPKIVTTTVPGRPTMMISTTAMNTALLQWHPPKELPGELLGYRLQYCRADEARPNTIDFGKDDQHFTVTGLHKGTTYIFRLAAKNRAGLGEEFEKEIRTPEDLPSGFPQNLHVTGLTTSTTELAWDPPVLAERNGRIISYTVVFRDINSQQELQNITTDTRFTLTGLKPDTTYDIKVRAWTSKGSGPLSPSIQSRTMPVEQVFAKNFRVAAAMKTSVLLSWEVPDSYKSAVPFKILYNGQSVEVDGHSMRKLIADLQPNTEYSFVLMNRGSSAGGLQHLVSIRTAPDLLPHKPLPASAYIEDGRFDLSMPHVQDPSLVRWFYIVVVPIDRVGGSMLTPRWSTPEELELDELLEAIEQGGEEQRRRRRQAERLKPYVAAQLDVLPETFTLGDKKNYRGFYNRPLSPDLSYQCFVLASLKEPMDQKRYASSPYSDEIVVQVTPAQQQEEPEMLWVTGPVLAVILIILIVIAILLFKRKRTHSPSSKDEQSIGLKDSLLAHSSDPVEMRRLNYQTPGMRDHPPIPITDLADNIERLKANDGLKFSQEYESIDPGQQFTWENSNLEVNKPKNRYANVIAYDHSRVILTSIDGVPGSDYINANYIDGYRKQNAYIATQGPLPETMGDFWRMVWEQRTATVVMMTRLEEKSRVKCDQYWPARGTETCGLIQVTLLDTVELATYTVRTFALHKSGSSEKRELRQFQFMAWPDHGVPEYPTPILAFLRRVKACNPLDAGPMVVHCSAGVGRTGCFIVIDAMLERMKHEKTVDIYGHVTCMRSQRNYMVQTEDQYVFIHEALLEAATCGHTEVPARNLYAHIQKLGQVPPGESVTAMELEFKLLASSKAHTSRFISANLPCNKFKNRLVNIMPYELTRVCLQPIRGVEGSDYINASFLDGYRQQKAYIATQGPLAESTEDFWRMLWEHNSTIIVMLTKLREMGREKCHQYWPAERSARYQYFVVDPMAEYNMPQYILREFKVTDARDGQSRTIRQFQFTDWPEQGVPKTGEGFIDFIGQVHKTKEQFGQDGPITVHCSAGVGRTGVFITLSIVLERMRYEGVVDMFQTVKTLRTQRPAMVQTEDQYQLCYRAALEYLGSFDHYAT

SEQ ID NO: 11143 - protein, 1332 aa, Homo Sapiens
  misc_feature (1)..(1): Xaa can be any naturally occurring amino acid
XSLLPGITYSLRVLAFTAVGDGPPSPTIQVKTQQGVPAQPADFQAEVESDTRIQLSWLLPPQERIIMYELVYWAAEDEDQQHKVTFDPTSSYTLEDLKPDTLYRFQLAARSDMGVGVFTPTIEARTAQSMPSGPPRKVEVEPLNSTAVHVYWKLPVPSKQHGQIRGYQVTYVRLENGEPRGLPIIQDVMLAEAQETTISGLTPETTYSVTVAAYTTKGDGARSKPKIVTTTGAVPGRPTMMISTTAMNTALLQWHPPKELPGELLGYRLQYCRADEARPNTIDFGKDDQHFTVTGLHKGTTYIFRLAAKNRAGLGEEFEKEIRTPEDLPSGFPQNLHVTGLTTSTTELAWDPPVLAERNGRIISYTVVFRDINSQQELQNITTDTRFTLTGLKPDTTYDIKVRAWTSKGSGPLSPSIQSRTMPVEQVFAKNFRVAAAMKTSVLLSWEVPDSYKSAVPFKILYNGQSVEVDGHSMRKLIADLQPNTEYSFVLMNRGSSAGGLQHLVSIRTAPDLLPHKPLPASAYIEDGRFDLSMPHVQDPSLVRWFYIVVVPIDRVGGSMLTPRWSTPEELELDELLEAIEQGGEEQRRRRRQAERLKPYVAAQLDVLPETFTLGDKKNYRGFYNRPLSPDLSYQCFVLASLKEPMDQKRYASSPYSDEIVVQVTPAQQQEEPEMLWVTGPVLAVILIILIVIAILLFKRKRTHSPSSKDEQSIGLKDSLLAHSSDPVEMRRLNYQTPGSSVPSCPNTSSMRDHPPIPITDLADNIERLKANDGLKFSQEYESIDPGQQFTWENSNLEVNKPKNRYANVIAYDHSRVILTSIDGVPGSDYINANYIDGYRKQNAYIATQGPLPETMGDFWRMVWEQRTATVVMMTRLEEKSRVKCDQYWPARGTETCGLIQVTLLDTVELATYTVRTFALHKSGSSEKRELRQFQFMAWPDHGVPEYPTPILAFLRRVKACNPLDAGPMVVHCSAGVGRTGCFIVIDAMLERMKHEKTVDIYGHVTCMRSQRNYMVQTEDQYVFIHEALLEAATCGHTEVPARNLYAHIQKLGQVPPGESVTAMELEFKLLASSKAHTSRFISANLPCNKFKNRLVNIMPYELTRVCLQPIRGVEGSDYINASFLDGYRQQKAYIATQGPLAESTEDFWRMLWEHNSTIIVMLTKLREMGREKCHQYWPAERSARYQYFVVDPMAEYNMPQYILREFKVTDARDGQSRTIRQFQFTDWPEQGVPKTGEGFIDFIGQVHKTKEQFGQDGPITVHCSAGVGRTGVFITLSIVLERMRYEGVVDMFQTVKTLRTQRPAMVQTEDQYQLCYRAALEYLGSFDHYAT

SEQ ID NO: 11144 - protein, 1291 aa, Homo Sapiens
  misc_feature (1)..(1): Xaa can be any naturally occurring amino acid
XSVTLTWDSGNSEPVTYYGIQYRAAGTEGPFQEVDGVATTRYSIGGLSPFSEYAFRVLAVNSIGRGPPSEAVRARTGEQAPSSPPRRVQARMLSASTMLVQWEPPEEPNGLVRGYRVYYTPDSRRPPNAWHKHNTDAGLLTTVGSLLPGITYSLRVLAFTAVGDGPPSPTIQVKTQQGVPAQPADFQAEVESDTRIQLSWLLPPQERIIMYELVYWAAEDEDQQHKVTFDPTSSYTLEDLKPDTLYRFQLAARSDMGVGVFTPTIEARTAQSMPSGPPRKVEVEPLNSTAVHVYWKLPVPSKQHGQIRGYQVTYVRLENGEPRGLPIIQDVMLAEAQWRPEESEDYETTISGLTPETTYSVTVAAYTTKGDGARSKPKIVTTTGAVFAKNFRVAAAMKTSVLLSWEVPDSYKSAVPFKILYNGQSVEVDGHSMRKLIADLQPNTEYSFVLMNRGSSAGGLQHLVSIRTAPDLLPHKPLPASAYIEDGRFDLSMPHVQDPSLVRWFYIVVVPIDRVGGSMLTPRWSTPEELELDELLEAIEQGGEEQRRRRRQAERLKPYVAAQLDVLPETFTLGDKKNYRGFYNRPLSPDLSYQCFVLASLKEPMDQKRYASSPYSDEIVVQVTPAQQQEEPEMLWVTGPVLAVILIILIVIAILLFKRKRTHSPSSKDEQSIGLKDSLLAHSSDPVEMRRLNYQTPGSSVPSCPNTSSMRDHPPIPITDLADNIERLKANDGLKFSQEYESIDPGQQFTWENSNLEVNKPKNRYANVIAYDHSRVILTSIDGVPGSDYINANYIDGYRKQNAYIATQGPLPETMGDFWRMVWEQRTATVVMMTRLEEKSRVKCDQYWPARGTETCGLIQVTLLDTVELATYTVRTFALHKSGSSEKRELRQFQFMAWPDHGVPEYPTPILAFLRRVKACNPLDAGPMVVHCSAGVGRTGCFIVIDAMLERMKHEKTVDIYGHVTCMRSQRNYMVQTEDQYVFIHEALLEAATCGHTEVPARNLYAHIQKLGQVPPGESVTAMELEFKLLASSKAHTSRFISANLPCNKFKNRLVNIMPYELTRVCLQPIRGVEGSDYINASFLDGYRQQKAYIATQGPLAESTEDFWRMLWEHNSTIIVMLTKLREMGREKCHQYWPAERSARYQYFVVDPMAEYNMPQYILREFKVTDARDGQSRTIRQFQFTDWPEQGVPKTGEGFIDFIGQVHKTKEQFGQDGPITVHCSAGVGRTGVFITLSIVLERMRYEGVVDMFQTVKTLRTQRPAMVQTEDQYQLCYRAALEYLGSFDHYAT

SEQ ID NO: 11145 - protein, 120 aa, Homo Sapiens
MKPAAREARLPPRSPGLRWALPLLLLLLRLGQILCAGGRPSPVFDIKAVSISPTNVILTWKSNDTAASEYKYVVKHKMENEKTITVVHQPWCNITGLRPATSYVFSITPGIGNETWGDPR

SEQ ID NO: 11146 - protein, 147 aa, Homo Sapiens [sequence omitted]

SEQ ID NO: 11147 - protein, 539 aa, Homo Sapiens
MKPAAREARLPPRSPGLRWALPLLLLLLRLGQILCAGGTPSPIPDPSVATVATGENGITQISSTAESFHKQNGTGTPQVETNTSEDGESSGANDSLRTPEQGSNGTDGASQKTPSSTGPSPVFDIKAVSISPTNVILTWKSNDTAASEYKYVVKHKMENEKTITVVHQPWCNITGLRPATSYVFSITPGIGNETWGDPRVIKVITEPIPVSDLRVALTGVRKAALSWSNGNGTASCRVLLESIGSHEELTQDSRLQVNISGLKPGVQYNINPYLLQSNKTKGDPLGTEGGLDASNTERSRAGSPTAPVHDESLVGPVDPSSGQQSRDTEVLLVGLEPGTRYNATVYSQAANGTEGQPQAIEFRTNAIQVFDVTAVNISATSLTLIWKVSDNESSSNYTYKIHVAGETDSSNLNVSEPRAVIPGLRSSTFYNITVCPVLGDIEGTPGFLQVHTPPVPVSDFRVTVVSTTEIGLAWSSHDAESFQMHITQEGAGNSRVEITTNQSIIIGGLFPGTKYCFEIVPKGPNGTEGASRTVCNRTG

SEQ ID NO: 11148 - protein, 1337 aa, Homo Sapiens
MKPAAREARLPPRSPGLRWALPLLLLLLRLGQILCAGGTPSPIPDPSVATVATGENGITQISSTAESFHKQNGTGTPQVETNTSEDGESSGANDSLRTPEQGSNGTDGASQKTPSSTGPSPVFDIKAVSISPTNVILTWKSNDTAASEYKYVVKHKMENEKTITVVHQPWCNITGLRPATSYVFSITPGIGNETWGDPRVIKVITEPIPVSDLRVALTGVRKAALSWSNGNGTASCRVLLESIGSHEELTQDSRLQVNISGLKPGVQYNINPYLLQSNKTKGDPLGTEGGLDASNTERSRAGSPTAPVHDESLVGPVDPSSGQQSRDTEVLLVGLEPGTRYNATVYSQAANGTEGQPQAIEFRTNAIQVFDVTAVNISATSLTLIWKVSDNESSSNYTYKIHVAGETDSSNLNVSEPRAVIPGLRSSTFYNITVCPVLGDIEGTPGFLQVHTPPVPVSDFRVTVVSTTEIGLAWSSHDAESFQMHITQEGAGNSRVEITTNQSIIIGGLFPGTKYCFEIVPKGPNGTEGASRTVCNRTVPSAVFDIHVVYVTTTEMWLDWKSPDGASEYVYHLVIESKHGSNHTSTYDKAITLQGLIPGTLYNITISPEVDHVWGDPNSTAQYTRPSNVSNIDVSTNTTAATLSWQNFDDASPTYSYCLLIEKAGNSSNATQVVTDIGITDATVTELIPGSSYTVEIFAQVGDGIKSLEPGRKSFCTDPASMASFDCEVVPKEPALVLKWTCPPGANAGFELEVSSGAWNNATHLESCSSENGTEYRTEVTYLNFSTSYNISITTVSCGKMAAPTRNTCTTGITDPPPPDGSPNITSVSHNSVKVKFSGFEASHGPIKAYAVILTTGEAGHPSADVLKYTYEDFKKGASDTYVTYLIRTEEKGRSQSLSEVLKYEIDVGNESTTLGYYNGKLEPLGSYRACVAGFTNITFHPQNKGLIDGAESYVSFSRYSDAVSLPQDPGVICGAVFGCIFGALVIVTVGGFIFWRKKRKDAKNNEVSFSQIKPKKSKLIRVENFEAYFKKQQADSNCGFAEEYEDLKLVGISQPKYAAELAENRGKNRYNNVLPYDISRVKLSVQTHSTDDYINANYMPGYHSKKDFIATQGPLPNTLKDFWRMVWEKNVYAIIMLTKCVEQGRTKCEEYWPSKQAQDYGDITVAMTSEIVLPEWTIRDFTVKNIQTSESHPLRQFHFTSWPDHGVPDTTDLLINFRYLVRDYMKQSPPESPILVHCSAGVGRTGTFIAIDRLIYQIENENTVDVYGIVYDLRMHRPLMVQTEDQYVFLNQCVLDIVRSQKDSKVDLIYQNTTAMTIYENLAPVTTFGKTNGYIA

SEQ ID NO: 11149 - protein, 1342 aa, Homo Sapiens
MKPAAREARLPPRSPGLRWALPLLLLLLRLGQILCAGGTPSPIPDPSVATVATGENGITQISSTAESFHKQNGTGTPQVETNTSEDGESSGANDSLRTPEQGSNGTDGASQKTPSSTGPSPVFDIKAVSISPTNVILTWKSNDTAASEYKYVVKHKMENEKTITVVHQPWCNITGLRPATSYVFSITPGIGNETWGDPRVIKVITEPIPVSDLRVALTGVRKAALSWSNGNGTASCRVLLESIGSHEELTQDSRLQVNISGLKPGVQYNINPYLLQSNKTKGDPLGTEGGLDASNTERSRAGSPTAPVHDESLVGPVDPSSGQQSRDTEVLLVGLEPGTRYNATVYSQAANGTEGQPQAIEFRTNAIQVFDVTAVNISATSLTLIWKVSDNESSSNYTYKIHVAGETDSSNLNVSEPRAVIPGLRSSTFYNITVCPVLGDIEGTPGFLQVHTPPVPVSDFRVTVVSTTEIGLAWSSHDAESFQMHITQEGAGNSRVEITTNQSIIIGGLFPGTKYCFEIVPKGPNGTEGASRTVCNRTVPSAVFDIHVVYVTTTEMWLDWKSPDGASEYVYHLVIESKHGSNHTSTYDKAITLQGLIPGTLYNITISPEVDHVWGDPNSTAQYTRPSNVSNIDVSTNTTAATLSWQNFDDASPTYSYCLLIEKAGNSSNATQVVTDIGITDATVTELIPGSSYTVEIFAQVGDGIKSLEPGRKSFCTDPASMASFDCEVVPKEPALVLKWTCPPGANAGFELEVSSGAWNNATHLESCSSENGTEYRTEVTYLNFSTSYNISITTVSCGKMAAPTRNTCTTGITDPPPPDGSPNITSVSHNSVKVKFSGFEASHGPIKAYAVILTTGEAGHPSADVLKYTYEDFKKGASDTYVTYLIRTEEKGRSQSLSEVLKYEIDVGNESTTLGYYNGKLEPLGSYRCLLRACVAGFTNITFHPQNKGLIDGAESYVSFSRYSDAVSLPQDPGVICGAVFGCIFGALVIVTVGGFIFWRKKRKDAKNNEVSFSQIKSLKRSKLIRVENFEAYFKKQQADSNCGFAEEYEDLKLVGISQPKYAAELAENRGKNRYNNVLPYDISRVKLSVQTHSTDDYINANYMPGYHSKKDFIATQGPLPNTLKDFWRMVWEKNVYAIIMLTKCVEQGRTKCEEYWPSKQAQDYGDITVAMTSEIVLPEWTIRDFTVKNIQTSESHPLRQFHFTSWPDHGVPDTTDLLINFRYLVRDYMKQSPPESPILVHCSAGVGRTGTFIAIDRLIYQIENENTVDVYGIVYDLRMHRPLMVQTEDQYVFLNQCVLDIVRSQKDSKVDLIYQNTTAMTIYENLAPVTTFGKTNGYIA

SEQ ID NO: 11150 - protein, 1338 aa, Homo Sapiens [sequence omitted]

SEQ ID NO: 11151 - protein, 1216 aa, Homo Sapiens
MGHLPTGIHGARRLLPLLWLFVLFKNATAFHVTVQDDNNIVVSLEASDVISPASVYVVKITGESKNYFFEFEEFNSTLPPPVIFKASYHGLYYIITLVVVNGNVVTKPSRSITVLTKPLPVTSVSIYDYKPSPETGVLFEIHYPEKYNVFTRVNISYWEGKDFRTMLYKDFFKGKTVFNHWLPGMCYSNITFQLVSEATFNKSTLVEYSGVSHEPKQHRTAPYPPQNISVRIVNLNKNNWEEQSGNFPEESFMRSQDTIGKEKLFHFTEETPEIPSGNISSGWPDFNSSDYETTSQPYWWDSASAAPESEDEFVSVLPMEYENNSTLSETEKSTSGSFSFFPVQMILTWLPPKPPTAFDGFHIHIEREENFTEYLMVDEEAHEFVAELKEPGKYKLSVTTFSSSGSCETRKSQSAKSLSFYISPSGEWIEELTEKPQHVSVHVLSSTTALMSWTSSQENYNSTIVSVVSLTCQKQKESQRLEKQYCTQVNSSKPIIENLVPGAQYQVVIYLRKGPLIGPPSDPVTFAIVPTGIKDLMLYPLGPTAVVLSWTRPYLGVFRKYVVEMFYFNPATMTSEWTTYYEIAATVSLTASVRIANLLPAWYYNFRVTMVTWGDPELSCCDSSTISFITAPVAPEITSVEYFNSLLYISWTYGDDTTDLSHSRMLHWMVVAEGKKKIKKSVTRNVMTAILSLPPGDIYNLSVTACTERGSNTSMLRLVKLEPAPPKSLFAVNKTQTSVTLLWVEEGVADFFEVFCQQVGSSQKTKLQEPVAVSSHVVTISSLLPATAYNCSVTSFSHDSPSVPTFIAVSTMVTEMNPNVVVISVLAILSTLLIGLLLVTLIILRKKHLQMARECGAGTFVNFASLERDGKLPYNWRRSIFAFLTLLPSCLWTDYLLAFYINPWSKNGLKKRKLTNPVQLDDFDAYIKDMAKDSDYKFSLQFEELKLIGLDIPHFAADLPLNRCKNRYTNILPYDFSRVRLVSMNEEEGADYINANYIPGYNSPQEYIATQGPLPETRNDFWKMVLQQKSQIIVMLTQCNEKRRVKCDHYWPFTEEPIAYGDITVEMISEEEQDDWACRHFRINYADEMQDVMHFNYTAWPDHGVPTANAAESILQFVHMVRQQATKSKGPMIIHCSAGVGRTGTFIALDRLLQHIRDHEFVDILGLVSEMRSYRMSMVQTEEQYIFIHQCVQLMWMKKKQQFCISDVIYENVSKS

SEQ ID NO: 11152 - protein, 1188 aa, Homo Sapiens
MGHLPTGIHGARRLLPLLWLFVLFKNATAFHVTVQDDNNIVVSLEASDVISPASVYVVKITGESKNYFFEFEEFNSTLPPPVIFKASYHGLYYIITLVVVNGNVVTKPSRSITVLTKPLPVTSVSIYDYKPSPETGVLFEIHYPEKYNVFTRVNISYWEGKDFRTMLYKDFFKGKTVFNHWLPGMCYSNITFQLVSEATFNKSTLVEYSGVSHEPKQHRTAPYPPQNISVRIVNLNKNNWEEQSGNFPEESFMRSQDTIGKEKLFHFTEETPEIPSGNISSGWPDFNSSDYETTSQPYWWDSASAAPESEDEFVSVLPMEYENNSTLSETEKSTSGSFSFFPVQMILTWLPPKPPTAFDGFHIHIEREENFTEYLMVDEEAHEFVAELKEPGKYKLSVTTFSSSGSCETRKSQSAKSLSFYISPSGEWIEELTEKPQHVSVHVLSSTTALMSWTSSQENYNSTIVSVVSLTCQKQKESQRLEKQYCTQVNSSKPIIENLVPGAQYQVVIYLRKGPLIGPPSDPVTFAIVPTGIKDLMLYPLGPTAVVLSWTRPYLGVFRKYVVEMFYFNPATMTSEWTTYYEIAATVSLTASVRIANLLPAWYYNFRVTMVTWGDPELSCCDSSTISFITAPVAPEITSVEYFNSLLYISWTYGDDTTDLSHSRMLHWMVVAEGKKKIKKSVTRNVMTAILSLPPGDIYNLSVTACTERGSNTSMLRLVKLEPAPPKSLFAVNKTQTSVTLLWVEEGVADFFEVFCQQVGSSQKTKLQEPVAVSSHVVTISSLLPATAYNCSVTSFSHDSPSVPTFIAVSTMVTEMNPNVVVISVLAILSTLLIGLLLVTLIILRKKHLQMARECGAGTFVNFASLERDGKLPYNWSKNGLKKRKLTNPVQLDDFDAYIKDMAKDSDYKFSLQFEELKLIGLDIPHFAADLPLNRCKNRYTNILPYDFSRVRLVSMNEEEGADYINANYIPGYNSPQEYIATQGPLPETRNDFWKMVLQQKSQIIVMLTQCNEKRRVKCDHYWPFTEEPIAYGDITVEMISEEEQDDWACRHFRINYADEMQDVMHFNYTAWPDHGVPTANAAESILQFVHMVRQQATKSKGPMIIHCSAGVGRTGTFIALDRLLQHIRDHEFVDILGLVSEMRSYRMSMVQTEEQYIFIHQCVQLMWMKKKQQFCISDVIYENVSKS

SEQ ID NO: 11153 - protein, 597 aa, Homo Sapiens
MGHLPTGIHGARRLLPLLWLFVLFKNATAFHVTVQDDNNIVVSLEASDVISPASVYVVKITGESKNYFFEFEEFNSTLPPPVIFKASYHGLYYIITLVVVNGNVVTKPSRSITVLTKPLPVTSVSIYDYKPSPETGVLFEIHYPEKYNVFTRVNISYWEGKDFRTMLYKDFFKGKTVFNHWLPGMCYSNITFQLVSEATFNKSTLVEYSGVSHEPKQHRTAPYPPQNISVRIVNLNKNNWEEQSGNFPEESFMRSQDTIGKEKLFHFTEETPEIPSGNISSGWPDFNSSDYETTSQPYWWDSASAAPESEDEFVSVLPMEYENNSTLSETEKSTSGSFSFFPVQMILTWLPPKPPTAFDGFHIHIEREENFTEYLMVDEEAHEFVAELKEPGKYKLSVTTFSSSGSCETRKSQSAKSLSFYISPSGEWIEELTEKPQHVSVHVLSSTTALMSWTSSQENYNSTIVSVVSLTCQKQKESQRLEKQYCTQVNSSKPIIENLVPGAQYQVVIYLRKGPLIGPPSDPVTFAIVPTGIKDLMLYPLGPTAVVLSWTRPYLGVFRKYVVEMFYFNPATMTSEWTTYYEIAATVSLTASVVIFP

SEQ ID NO: 11154 - protein, 405 aa, Homo Sapiens
MVTEMNPNVVVISVLAILSTLLIGLLLVTLIILRKKHLQMARECGAGTFVNFASLERDGKLPYNWRRSIFAFLTLLPSCLWTDYLLAFYINPWSKNGLKKRKLTNPVQLDDFDAYIKDMAKDSDYKFSLQFEELKLIGLDIPHFAADLPLNRCKNRYTNILPYDFSRVRLVSMNEEEGADYINANYIPGYNSPQEYIATQGPLPETRNDFWKMVLQQKSQIIVMLTQCNEKRRVKCDHYWPFTEEPIAYGDITVEMISEEEQDDWACRHFRINYADEMQDVMHFNYTAWPDHGVPTANAAESILQFVHMVRQQATKSKGPMIIHCSAGVGRTGTFIALDRLLQHIRDHEFVDILGLVSEMRSYRMSMVQTEEQYIFIHQCVQLMWMKKKQQFCISDVIYENVSKS

SEQ ID NO: 11155 - protein, 405 aa, Homo Sapiens; identical to SEQ ID NO: 11154

SEQ ID NO: 11156 - protein, 377 aa, Homo Sapiens
MVTEMNPNVVVISVLAILSTLLIGLLLVTLIILRKKHLQMARECGAGTFVNFASLERDGKLPYNWSKNGLKKRKLTNPVQLDDFDAYIKDMAKDSDYKFSLQFEELKLIGLDIPHFAADLPLNRCKNRYTNILPYDFSRVRLVSMNEEEGADYINANYIPGYNSPQEYIATQGPLPETRNDFWKMVLQQKSQIIVMLTQCNEKRRVKCDHYWPFTEEPIAYGDITVEMISEEEQDDWACRHFRINYADEMQDVMHFNYTAWPDHGVPTANAAESILQFVHMVRQQATKSKGPMIIHCSAGVGRTGTFIALDRLLQHIRDHEFVDILGLVSEMRSYRMSMVQTEEQYIFIHQCVQLMWMKKKQQFCISDVIYENVSKS

SEQ ID NO: 11157 - protein, 377 aa, Homo Sapiens; identical to SEQ ID NO: 11156

SEQ ID NO: 11158 - protein, 116 aa, Homo Sapiens
WKMVLQQKSQIIVMLTQCNEKRRVKCDHYWPFTEEPIAYGDITVEMISEEEQDDWACRHFRINYADEMQDVMHFNYTAWPDHGVPTANAAESILQFVHMVRQQATKSKGPMIIHCR

SEQ ID NO: 11159 - protein, 88 aa, Homo Sapiens
  misc_feature (1)..(1): Xaa can be any naturally occurring amino acid
XVTLLWVEEGVADFFEVFCQQVGSSQKTKLQEPVAVSSHVVTISSLLPATAYNCSVTSFSHDSPSVPTFIAVSTMGSVELVHLSILHP

SEQ ID NO: 11160 - protein, 79 aa, Homo Sapiens
MAPTWGPGMVSVVGPMGLLVVLLVGGCAAEEPPRFIKEPKDQIGVSGGVASFVCQATGDPKPRVTWNKKGKKVNSQRFE

SEQ ID NO: 11161 - protein, 91 aa, Homo Sapiens
MAPTWGPGMVSVVGPMGLLVVLLVGGCAAEEPPRFIKEPKDQIGVSGGVASFVCQATGDPKPRVTWNKKGKKVNSQRFETIEFDESAGAVL

SEQ ID NO: 11162 - protein, 1948 aa, Homo Sapiens
MAPTWGPGMVSVVGPMGLLVVLLVGGCAAEEPPRFIKEPKDQIGVSGGVASFVCQATGDPKPRVTWNKKGKKVNSQRFETIEFDESAGAVLRIQPLRTPRDENVYECVAQNSVGEITVHAKLTVLREDQLPSGFPNIDMGPQLKVVERTRTATMLCAASGNPDPEITWFKDFLPVDPSASNGRIKQLRSETFESTPIRGALQIESSEETDQGKYECVATNSAGVRYSSPANLYVRELREVRRVAPRFSILPMSHEIMPGGNVNITCVAVGSPMPYVKWMQGAEDLTPEDDMPVGRNVLELTDVKDSANYTCVAMSSLGVIEAVAQITVKSLPKAPGTPMVTENTATSITITWDSGNPDPVSYYVIEYKSKSQDGPYQIKEDITTTRYSIGGLSPNSEYEIWVSAVNSIGQGPPSESVVTRTGEQAPASAPRNVQARMLSATTMIVQWEEPVEPNGLIRGYRVYYTMEPEHPVGNWQKHNVDDSLLTTVGSLLEDETYTVRVLAFTSVGDGPLSDPIQVKTQQGVPGQPMNLRAEARSETSITLSWSPPRQESIIKYELLFREGDHGREVGRTFDPTTSYVVEDLKPNTEYAFRLAARSPQGLGAFTPVVRQRTLQSKPSAPPQDVKCVSVRSTAILVSWRPPPPETHNGALVGYSVRYRPLGSEDPEPKEVNGIPPTTTQILLEALEKWTQYRITTVAHTEVGPGPESSPVVVRTDEDVPSAPPRKVEAEALNATAIRVLWRSPAPGRQHGQIRGYQVHYVRMEGAEARGPPRIKDVMLADAQWETDDTAEYEMVITNLQPETAYSITVAAYTMKGDGARSKPKVVVTKGAVLGRPTLSVQQTPEGSLLARWEPPAGTAEDQVLGYRLQFGREDSTPLATLEFPPSEDRYTASGVHKGATYVFRLAARSRGGLGEEAAEVLSIPEDTPRGHPQILEAAGNASAGTVLLRWLPPVPAERNGAIVKYTVAVREAGALGPARETELPAAAEPGAENALTLQGLKPDTAYDLQVRAHTRRGPGPFSPPVRYRTFLRDQVSPKNFKVKMIMKTSVLLSWEFPDNYNSPTPYKIQYNGLTLDVDGRTTKKLITHLKPHTFYNFVLTNRGSSLGGLQQTVTAWTAFNLLNGKPSVAPKPDADGFIMVYLPDGQSPVPVQSYFIVMVPLRKSRGGQFLTPLGSPEDMDLEELIQDISRLQRRSLRHSRQLEVPRPYIAARFSVLPPTFHPGDQKQYGGFDNRGLEPGHRYVLFVLAVLQKSEPTFAASPFSDPFQLDNPDPQPIVDGEEGLIWVIGPVLAVVFIICIVIAILLYKNKPDSKRKDSEPRTKCLLNNADLAPHHPKDPVEMRRINFQTPDSGLRSPLREPGFHFESMLSHPPIPIADMAEHTERLKANDSLKLSQEYESIDPGQQFTWEHSNLEVNKPKNRYANVIAYDHSRVILQPIEGIMGSDYINANYVDGYRCQNAYIATQGPLPETFGDFWRMVWEQRSATIVMMTRLEEKSRIKCDQYWPNRGTETYGFIQVTLLDTIELATFCVRTFSLHKNGSSEKREVRQFQFTAWPDHGVPEYPTPFLAFLRRVKTCNPPDAGPIVVHCSAGVGRTGCFIVIDAMLERIKPEKTVDVYGHVTLMRSQRNYMVQTEDQYSFIHEALLEAVGCGNTEVPARSLYAYIQKLAQVEPGEHVTGMELEFKRLANSKAHTSRFISANLPCNKFKNRLVNIMPYESTRVCLQPIRGVEGSDYINASFIDGYRQQKAYIATQGPLAETTEDFWRMLWENNSTIVVMLTKLREMGREKCHQYWPAERSARYQYFVVDPMAEYNMPQYILREFKVTDARDGQSRTVRQFQFTDWPEQGVPKSGEGFIDFIGQVHKTKEQFGQDGPISVHCSAGVGRTGVFITLSIVLERMRYEGVVDIFQTVKMLRTQRPAMVQTEDEYQFCYQAALEYLGSFDHYAT

SEQ ID NO: 11163 - protein, 1505 aa, Homo Sapiens
MAPTWGPGMVSVVGPMGLLVVLLVGGCAAEEPPRFIKEPKDQIGVSGGVASFVCQATGDPKPRVTWNKKGKKVNSQRFETIEFDESAGAVLRIQPLRTPRDENVYECVAQNSVGEITVHAKLTVLREDQLPSGFPNIDMGPQLKVVERTRTATMLCAASGNPDPEITWFKDFLPVDPSASNGRIKQLRSGALQIESSEETDQGKYECVATNSAGVRYSSPANLYVRELREVRRVAPRFSILPMSHEIMPGGNVNITCVAVGSPMPYVKWMQGAEDLTPEDDMPVGRNVLELTDVKDSANYTCVAMSSLGVIEAVAQITVKSLPKAPGTPMVTENTATSITITWDSGNPDPVSYYVIEYKSKSQDGPYQIKEDITTTRYSIGGLSPNSEYEIWVSAVNSIGQGPPSESVVTRTGEQAPASAPRNVQARMLSATTMIVQWEEPVEPNGLIRGYRVYYTMEPEHPVGNWQKHNVDDSLLTTVGSLLEDETYTVRVLAFTSVGDGPLSDPIQVKTQQGVPGQPMNLRAEARSETSITLSWSPPRQESIIKYELLFREGDHGREVGRTFDPTTSYVVEDLKPNTEYAFRLAARSPQGLGAFTPVVRQRTLQSISPKNFKVKMIMKTSVLLSWEFPDNYNSPTPYKIQYNGLTLDVDGRTTKKLITHLKPHTFYNFVLTNRGSSLGGLQQTVTAWTAFNLLNGKPSVAPKPDADGFIMVYLPDGQSPVPVQSYFIVMVPLRKSRGGQFLTPLGSPEDMDLEELIQDISRLQRRSLRHSRQLEVPRPYIAARFSVLPPTFHPGDQKQYGGFDNRGLEPGHRYVLFVLAVLQKSEPTFAASPFSDPFQLDNPDPQPIVDGEEGLIWVIGPVLAVVFIICIVIAILLYKNKPDSKRKDSEPRTKCLLNNADLAPHHPKDPVEMRRINFQTPGMLSHPPIPIADMAEHTERLKANDSLKLSQEYESIDPGQQFTWEHSNLEVNKPKNRYANVIAYDHSRVILQPIEGIMGSDYINANYVDGYRCQNAYIATQGPLPETFGDFWRMVWEQRSATIVMMTRLEEKSRIKCDQYWPNRGTETYGFIQVTLLDTIELATFCVRTFSLHKNGSSEKREVRQFQFTAWPDHGVPEYPTPFLAFLRRVKTCNPPDAGPIVVHCSAGVGRTGCFIVIDAMLERIKPEKTVDVYGHVTLMRSQRNYMVQTEDQYSFIHEALLEAVGCGNTEVPARSLYAYIQKLAQVEPGEHVTGMELEFKRLANSKAHTSRFISANLPCNKFKNRLVNIMPYESTRVCLQPIRGVEGSDYINASFIDGYRQQKAYIATQGPLAETTEDFWRMLWENNSTIVVMLTKLREMGREKCHQYWPAERSARYQYFVVDPMAEYNMPQYILREFKVTDARDGQSRTVRQFQFTDWPEQGVPKSGEGFIDFIGQVHKTKEQFGQDGPISVHCSAGVGRTGVFITLSIVLERMRYEGVVDIFQTVKMLRTQRPAMVQTEDEYQFCYQAALEYLGSFDHYAT

SEQ ID NO: 11164 - protein, 1501 aa, Homo Sapiens
MAPTWGPGMVSVVGPMGLLVVLLVGGCAAEEPPRFIKEPKDQIGVSGGVASFVCQATGDPKPRVTWNKKGKKVNSQRFETIEFDESAGAVLRIQPLRTPRDENVYECVAQNSVGEITVHAKLTVLREDQLPSGFPNIDMGPQLKVVERTRTATMLCAASGNPDPEITWFKDFLPVDPSASNGRIKQLRSGALQIESSEETDQGKYECVATNSAGVRYSSPANLYVRVRRVAPRFSILPMSHEIMPGGNVNITCVAVGSPMPYVKWMQGAEDLTPEDDMPVGRNVLELTDVKDSANYTCVAMSSLGVIEAVAQITVKSLPKAPGTPMVTENTATSITITWDSGNPDPVSYYVIEYKSKSQDGPYQIKEDITTTRYSIGGLSPNSEYEIWVSAVNSIGQGPPSESVVTRTGEQAPASAPRNVQARMLSATTMIVQWEEPVEPNGLIRGYRVYYTMEPEHPVGNWQKHNVDDSLLTTVGSLLEDETYTVRVLAFTSVGDGPLSDPIQVKTQQGVPGQPMNLRAEARSETSITLSWSPPRQESIIKYELLFREGDHGREVGRTFDPTTSYVVEDLKPNTEYAFRLAARSPQGLGAFTPVVRQRTLQSISPKNFKVKMIMKTSVLLSWEFPDNYNSPTPYKIQYNGLTLDVDGRTTKKLITHLKPHTFYNFVLTNRGSSLGGLQQTVTAWTAFNLLNGKPSVAPKPDADGFIMVYLPDGQSPVPVQSYFIVMVPLRKSRGGQFLTPLGSPEDMDLEELIQDISRLQRRSLRHSRQLEVPRPYIAARFSVLPPTFHPGDQKQYGGFDNRGLEPGHRYVLFVLAVLQKSEPTFAASPFSDPFQLDNPDPQPIVDGEEGLIWVIGPVLAVVFIICIVIAILLYKKKPHSKRKDSEPRTKCLLNNADLAPHHPKDPVEMRRINFQTPGMLSHPPIPIADMAEHTERLKANDSLKLSQEYESIDPGQQFTWEHSNLEVNKPKNRYANVIAYDHSRVILQPIEGIMGSDYINANYVDGYRCQNAYIATQGPLPETFGDFWRMVWEQRSATIVMMTRLEEKSRIKCDQYWPNRGTETYGFIQVTLLDTIELATFCVRTFSLHKNGSSEKREVRQFQFTAWPDHGVPEYPTPFLAFLRRVKTCNPPDAGPIVVHCSAGVGRTGCFIVIDAMLERIKPEKTVDVYGHVTLMRSQRNYMVQTEDQYSFIHEALLEAVGCGNTEVPARSLYAYIQKLAQVEPGEHVTGMELEFKRLANSKAHTSRFISANLPCNKFKNRLVNIMPYESTRVCLQPIRGVEGSDYINASFIDGYRQQKAYIATQGPLAETTEDFWRMLWENNSTIVVMLTKLREMGREKCHQYWPAERSARYQYFVVDPMAEYNMPQYILREFKVTDARDGQSRTVRQFQFTDWPEQGVPKSGEGFIDFIGQVHKTKEQFGQDGPISVHCSAGVGRTGVFITLSIVLERMRYEGVVDIFQTVKMLRTQRPAMVQTEDEYQFCYQAALEYLGSFDHYAT

SEQ ID NO: 11165 - protein, 1501 aa, Homo Sapiens
MAPTWGPGMVSVVGPMGLLVVLLVGGCAAEEPPRFIKEPKDQIGVSGGVASFVCQATGDPKPRVTWNKKGKKVNSQRFETIEFDESAGAVLRIQPLRTPRDENVYECVAQNSVGEITVHAKLTVLREDQLPSGFPNIDMGPQLKVVERTRTATMLCAASGNPDPEITWFKDFLPVDPSASNGRIKQLRSGALQIESSEETDQGKYECVATNSAGVRYSSPANLYVRVRRVAPRFSILPMSHEIMPGGNVNITCVAVGSPMPYVKWMQGAEDLTPEDDMPVGRNVLELTDVKDSANYTCVAMSSLGVIEAVAQITVKSLPKAPGTPMVTENTATSITITWDSGNPDPVSYYVIEYKSKSQDGPYQIKEDITTTRYSIGGLSPNSEYEIWVSAVNSIGQGPPSESVVTRTGEQAPASAPRNVQARMLSATTMIVQWEEPVEPNGLIRGYRVYYTMEPEHPVGNWQKHNVDDSLLTTVGSLLEDETYTVRVLAFTSVGDGPLSDPIQVKTQQGVPGQPMNLRAEARSETSITLSWSPPRQESIIKYELLFREGDHGREVGRTFDPTTSYVVEDLKPNTEYAFRLAARSPQGLGAFTPVVRQRTLQSISPKNFKVKMIMKTSVLLSWEFPDNYNSPTPYKIQYNGLTLDVDGRTTKKLITHLKPHTFYNFVLTNRGSSLGGLQQTVTAWTAFNLLNGKPSVAPKPDADGFIMVYLPDGQSPVPVQSYFIVMVPLRKSRGGQFLTPLGSPEDMDLEELIQDISRLQRRSLRHSRQLEVPRPYIAARFSVLPPTFHPGDQKQYGGFDNRGLEPGHRYVLFVLAVLQKSEPTFAASPFSDPFQLDNPDPQPIVDGEEGLIWVIGPVLAVVFIICIVIAILLYKNKPDSKRKDSEPRTKCLLNNADLAPHHPKDPVEMRRINFQTPGMLSHPPIPIADMAEHTERLKANDSLKLSQEYESIDPGQQFTWEHSNLEVNKPKNRYANVIAYDHSRVILQPIEGIMGSDYINANYVDGYRCQNAYIATQGPLPETFGDFWRMVWEQRSATIVMMTRLEEKSRIKCDQYWPNRGTETYGFIQVTLLDTIELATFCVRTFSLHKNGSSEKREVRQFQFTAWPDHGVPEYPTPFLAFLRRVKTCNPPDAGPIVVHCSAGVGRTGCFIVIDAMLERIKPEKTVDVYGHVTLMRSQRNYMVQTEDQYSFIHEALLEAVGCGNTEVPARSLYAYIQKLAQVEPGEHVTGMELEFKRLANSKAHTSRFISANLPCNKFKNRLVNIMPYESTRVCLQPIRGVEGSDYINASFIDGYRQQKAYIATQGPLAETTEDFWRMLWENNSTIVVMLTKLREMGREKCHQYWPAERSARYQYFVVDPMAEYNMPQYILREFKVTDARDGQSRTVRQFQFTDWPEQGVPKSGEGFIDFIGQVHKTKEQFGQDGPISVHCSAGVGRTGVFITLSIVLERMRYEGVVDIFQTVKMLRTQRPAMVQTEDEYQFCYQAALEYLGSFDHYAT

SEQ ID NO: 11166 - protein, 1910 aa, Homo Sapiens
MAPTWGPGMVSVVGPMGLLVVLLVGGCAAEEPPRFIKEPKDQIGVSGGVASFVCQATGDPKPRVTWNKKGKKVNSQRFETIEFDESAGAVLRIQPLRTPRDENVYECVAQNSVGEITVHAKLTVLREDQLPSGFPNIDMGPQLKVVERTRTATMLCAASGNPDPEITWFKDFLPVDPSASNGRIKQLRSGALQIESSEETDQGKYECVATNSAGVRYSSPANLYVRVRRVAPRFSILPMSHEIMPGGNVNITCVAVGSPMPYVKWMQGAEDLTPEDDMPVGRNVLELTDVKDSANYTCVAMSSLGVIEAVAQITVKSLPKAPGTPMVTENTATSITITWDSGNPDPVSYYVIEYKSKSQDGPYQIKEDITTTRYSIGGLSPNSEYEIWVSAVNSIGQGPPSESVVTRTGEQAPASAPRNVQARMLSATTMIVQWEEPVEPNGLIRGYRVYYTMEPEHPVGNWQKHNVDDSLLTTVGSLLEDETYTVRVLAFTSVGDGPLSDPIQVKTQQGVPGQPMNLRAEARSETSITLSWSPPRQESIIKYELLFREGDHGREVGRTFDPTTSYVVEDLKPNTEYAFRLAARSPQGLGAFTPVVRQRTLQSKPSAPPQDVKCVSVRSTAILVSWRPPPPETHNGALVGYSVRYRPLGSEDPEPKEVNGIPPTTTQILLEALEKWTQYRITTVAHTEVGPGPESSPVVVRTDEDVPSAPPRKVEAEALNATAIRVLWRSPAPGRQHGQIRGYQVHYVRMEGAEARGPPRIKDVMLADAQEMVITNLQPETAYSITVAAYTMKGDGARSKPKVVVTKGAVLGRPTLSVQQTPEGSLLARWEPPAGTAEDQVLGYRLQFGREDSTPLATLEFPPSEDRYTASGVHKGATYVFRLAARSRGGLGEEAAEVLSIPEDTPRGHPQILEAAGNASAGTVLLRWLPPVPAERNGAIVKYTVAVREAGALGPARETELPAAAEPGAENALTLQGLKPDTAYDLQVRAHTRRGPGPFSPPVRYRTFLRDQVSPKNFKVKMIMKTSVLLSWEFPDNYNSPTPYKIQYNGLTLDVDGRTTKKLITHLKPHTFYNFVLTNRGSSLGGLQQTVTAWTAFNLLNGKPSVAPKPDADGFIMVYLPDGQSPVPVQSYFIVMVPLRKSRGGQFLTPLGSPEDMDLEELIQDISRLQRRSLRHSRQLEVPRPYIAARFSVLPPTFHPGDQKQYGGFDNRGLEPGHRYVLFVLAVLQKSEPTFAASPFSDPFQLDNPDPQPIVDGEEGLIWVIGPVLAVVFIICIVIAILLYKNKPDSKRKDSEPRTKCLLNNADLAPHHPKDPVEMRRINFQTPGMLSHPPIPIADMAEHTERLKANDSLKLSQEYESIDPGQQFTWEHSNLEVNKPKNRYANVIAYDHSRVILQPIEGIMGSDYINANYVDGYRCQNAYIATQGPLPETFGDFWRMVWEQRSATIVMMTRLEEKSRIKCDQYWPNRGTETYGFIQVTLLDTIELATFCVRTFSLHKNGSSEKREVRQFQFTAWPDHGVPEYPTPFLAFLRRVKTCNPPDAGPIVVHCSAGVGRTGCFIVIDAMLERIKPEKTVDVYGHVTLMRSQRNYMVQTEDQYSFIHEALLEAVGCGNTEVPARSLYAYIQKLAQVEPGEHVTGMELEFKRLANSKAHTSRFISANLPCNKFKNRLVNIMPYESTRVCLQPIRGVEGSDYINASFIDGYRQQKAYIATQGPLAETTEDFWRMLWENNSTIVVMLTKLREMGREKCHQYWPAERSARYQYFVVDPMAEYNMPQYILREFKVTDARDGQSRTVRQFQFTDWPEQGVPKSGEGFIDFIGQVHKTKEQFGQDGPISVHCSAGVGRTGVFITLSIVLERMRYEGVVDIFQTVKMLRTQRPAMVQTEDEYQFCYQAALEYLGSFDHYAT

SEQ ID NO: 11167 - protein, 128 aa, Homo Sapiens
MAPTWGPGMVSVVGPMGLLVVLLVGGCAAEEPPRFIKEPKDQIGVSGGVASFVCQATGDPKPRVTWNKKGKKVNSQRFETIEFDESAGAVLRIQPLRTPRDENVYECVAQNSVGEITVHAKLTVLRGP

SEQ ID NO: 11168 - protein, 142 aa, Homo Sapiens
MAPGVARGPTPYWRLRLGGAALLLLLIPVAAAQEPPGAACSQNTNKTCEECLKNVSACLKKKTRMLDLKTTKALQHISPDASCEVHAPQPSPAGRPRGHCGLLTLASEPASLPGQAAGELPLKDSPLVLQTGDLLFPVHLCF

SEQ ID NO: 11169 - protein, 107 aa, Homo Sapiens
MAPGVARGPTPYWRLRLGGAALLLLLIPVAAAQEPPGAACSQNTNKTCEECLKNVSCLWCNTNKACLDYPVTSVLPPASLCKLSSARWGVCWGLFKEENPYARFENN

SEQ ID NO: 11170 - protein, 180 aa, Homo Sapiens
MAPGVARGPTPYWRLRLGGAALLLLLIPVAAAQEPPGAACSQNTNKTCEECLKNVSCLWCNTNKACLDYPVTSVLPPASLCKLSSARWGVCWVNFEALIITMSVVGGTLLLGIAICCCCCCRRKRSRKPDRSEEKAMREREERRIRQEERRAEMKTRHDEIRKKYGLFKEENPYARFENN

SEQ ID NO: 11171 - protein, 159 aa, Homo Sapiens
MGQAVSCVLGRLQPVKCTGARRVGRRGLRKQTSQECLWCNTNKACLDYPVTSVLPPASLCKLSSARWGVCWVNFEALIITMSVVGGTLLLGIAICCCCCCRRKRSRKPDRSEEKAMREREERRIRQEERRAEMKTRHDEIRKKYGLFKEENPYARFENN

SEQ ID NO: 11172 - protein, 381 aa, Homo Sapiens
MHLLAILFCALWSAVLAENSDDYDLMYVNLDNEIDNGLHPTEDPTPCACGQEHSEWDKLFIMLENSQMRERMLLQATDDVLRGELQRLREELGRLAESLARPCAPGAPAEARLTSALDELLQATRDAGRRLARMEGAEAQRPEEAGRALAAVLEELRQTRADLHAVQGWAARSWLPAGCETAILFPMRSKKIFGSVHPVRPMRLESFSACIWVKATDVLNKTILFSYGTKRNPYEIQLYLSYQSIVFVVGGEENKLVAEAMVSLGRWTHLCGTWNSEEGLTSLWVNGELAATTVEMATGHIVPEGGILQIGQEKNGCCVGGGFDETLAFSGRLTGFNIWDSVLSNEEIRETGGAESCHIRGNIVGWGVTEIQPHGGAQYVS

SEQ ID NO: 11173 - protein, 192 aa, Homo Sapiens
MGCSWRKTLSFFLVFVPIYLHGASSQEAAPVGPRKPFFERLRRLEEQFRRFQEVTWTHLQNIASNYNVSYNVDVRFRSLAEESQAVAQAVNRSQASVQGELAQLKAWVRKLQRRGRKFAAWAPPSFSQTPPPGTWSSSALVSSLPCEPCPSAAGSARPPAAWAPSCPTPPRTMTTSWCCTAETPCCPDPSTS

SEQ ID NO: 11174 - protein, 478 aa, Homo Sapiens
MGCSWRKTLSFFLVFVPIYLHGASSQEAAPVGPRKPFFERLRRLEEQFRRFQEVTWTHLQNIASNYNVSYNVDVRFRSLAEESQAVAQAVNRSQASVQGELAQLKAWVRKLQRRGRKVDTRLRALDLTLGERSQQRARERKAHKAQRDALQDSLARLEGLVHSQGARLAALEGRLPVAHPGTAALGPALVPTPTQPEELGPTSLKLQRDRQELRAASEHRGPPQDSSAPLQGRREPPASGSHRVLSGTAPKDPRQQAWSPQVPGEICGVGPTLVFPNASTRNVVFLSPGFVTALRALSFCSWVRTASGRLGTLLSYATEDNDNKLVLHGRDSLLPGSIHFVIGDPAFRELPLQLLLDGQWHHICVIWTSTQGRYWLHVDRRLVATGSRFREGYEIPPGGSLVLGQEQDSVGGGFDSSEAFVGSMSGLAIWDRALVPGEVANLAIGKEFPTGAILTLANAALAGGFVQGANCTCLERCP

SEQ ID NO: 11175 - protein, 473 aa, Homo Sapiens
MGSGNWEVTGPPCGSRCERPPGLPRGVHGQFRSAVGLSGLRWFRRFQEVTWTHLQNIASNYNVSYNVDVRFRSLAEESQAVAQAVNRSQASVQGELAQLKAWVRKLQRRGRKVDTRLRALDLTLGERSQQRARERKAHKAQRDALQDSLARLEGLVHSQGARLAALEGRLPVAHPGTAALGPALVPTPTQPEELGPTSLKLQRDRQELRAASEHRGPPQDSSAPLQGRREPPASGSHRVLSGTAPKDPRQQAWSPQVPGEICGVGPTLVFPNASTRNVVFLSPGFVTALRALSFCSWVRTASGRLGTLLSYATEDNDNKLVLHGRDSLLPGSIHFVIGDPAFRELPLQLLLDGQWHHICVIWTSTQGRYWLHVDRRLVATGSRFREGYEIPPGGSLVLGQEQDSVGGGFDSSEAFVGSMSGLAIWDRALVPGEVANLAIGKEFPTGAILTLANAALAGGFVQGANCTCLERCP

SEQ ID NO: 11176 - protein, 44 aa, Homo Sapiens
MARAMAAAWPLLLVALLVLSWPPPGTGAQHGGDACVTADLGAAW

SEQ ID NO: 11177 - protein, 364 aa, Homo Sapiens
MARAMAAAWPLLLVALLVLSWPPPGTGDVVVQAPTQVPGFLGDSVTLPCYLQVPNMEVTHVSQLTWARHGESGSMAVFHQTQGPSYSESKRLEFVAARLGAELRNASLRMFGLRVEDEGNYTCLFVTFPQGSRSVDIWLRVLAKPQNTAEVQKVQLTGEPVPMARCVSTGGRPPAQITWHSDLGGMPNTSQVPGFLSGTVTVTSLWILVPSSQVDGKNVTCKVEHESFEKPQLLTVNLTVYYPPEVSISGYDNNWYLGQNEATLTCDARSNPEPTGYNWSTTMGPLPPFAVAQGAQLLIRPVDKPINTTLICNVTNALGARQAELTVQVKGTEHASASANGHVSYSAVSRENSSSQDPQTEGTR

SEQ ID NO: 11178 - protein, 372 aa, Homo Sapiens
MARAMAAAWPLLLVALLVLSWPPPGTGDVVVQAPTQVPGFLGDSVTLPCYLQVPNMEVTHVSQLTWARHGESGSMAVFHQTQGPSYSESKRLEFVAARLGAELRNASLRMFGLRVEDEGNYTCLFVTFPQGSRSVDIWLRVLAKPQNTAEVQKVQLTGEPVPMARCVSTGGRPPAQITWHSDLGGMPNTSQVPGFLSGTVTVTSLWILVPSSQVDGKNVTCKVEHESFEKPQLLTVNLTVYYPPEVSISGYDNNWYLGQNEATLTCDARSNPEPTGYNWSTTMGPLPPFAVAQGAQLLIRPVDKPINTTLICNVTNALGARQAELTVQVKEGPPSEHSGTEHASASANGHVSYSAVSRENSSSQDPQTEGTR

SEQ ID NO: 11179 - protein, 392 aa, Homo Sapiens
MARAMAAAWPLLLVALLVLSWPPPGTGDVVVQAPTQVPGFLGDSVTLPCYLQVPNMEVTHVSQLTWARHGESGSMAVFHQTQGPSYSESKRLEFVAARLGAELRNASLRMFGLRVEDEGNYTCLFVTFPQGSRSVDIWLRVLAKPQNTAEVQKVQLTGEPVPMARCVSTGGRPPAQITWHSDLGGMPNTSQVPGFLSGTVTVTSLWILVPSSQVDGKNVTCKVEHESFEKPQLLTVNLTVYYPPEVSISGYDNNWYLGQNEATLTCDARSNPEPTGYNWSTTMGPLPPFAVAQGAQLLIRPVDKPINTTLICNVTNALGARQAELTVQVKEGPPSEHSGMSRNAIIFLVLGILVFLILLGIGIYFYWSKCSREVLWHCHLCPSSEHHQSCRN

SEQ ID NO: 11180 - protein, 417 aa, Homo Sapiens
MARAMAAAWPLLLVALLVLSWPPPGTGDVVVQAPTQVPGFLGDSVTLPCYLQVPNMEVTHVSQLTWARHGESGSMAVFHQTQGPSYSESKRLEFVAARLGAELRNASLRMFGLRVEDEGNYTCLFVTFPQGSRSVDIWLRVLAKPQNTAEVQKVQLTGEPVPMARCVSTGGRPPAQITWHSDLGGMPNTSQVPGFLSGTVTVTSLWILVPSSQVDGKNVTCKVEHESFEKPQLLTVNLTVYYPPEVSISGYDNNWYLGQNEATLTCDARSNPEPTGYNWSTTMGPLPPFAVAQGAQLLIRPVDKPINTTLICNVTNALGARQAELTVQVKEGPPSEHSGMSRNAIIFLVLGILVFLILLGIGIYFYWSKCSREVLWHCHLCPSSTEHASASANGHVSYSAVSRENSSSQDPQTEGTR

SEQ ID NO: 11181 - protein, 70 aa, Homo Sapiens
  misc_feature (1)..(1): Xaa can be any naturally occurring amino acid
XCKVEHESFEKPQLLTVNLTVYYPPEVSISGYDNNWYLGQNEATLTCDARSNPEPTGYNWSTYRACQRLS

SEQ ID NO: 11182 - protein, 224 aa, Homo Sapiens
MAKRSRGPGRRCLLALVLFCAWGTLAVVAQKPGAGCPSRCLCFRTTVRCMHLLLEAVPAVAPQTSILDLRFNRIREIQPGAFRRLRNLNTLLLNNNQIKRIPSGAFEDLENLKYLYLHFNQIETLDPDSFQHLPKLERLFLHNNRITHLVPGTFNHLESMKRLRLDSNTLHCDCEILWLADLLKTYAESGNAQAAAICEYPRRIQGRSVATITPEELNCERPRI

SEQ ID NO: 11183 - protein, 1479 aa, Homo Sapiens
MAKRSRGPGRRCLLALVLFCAWGTLAVVAQKPGAGCPSRCLCFRTTVRCMHLLLEAVPAVAPQTSILDLRFNRIREIQPGAFRRLRNLNTLLLNNNQIKRIPSGAFEDLENLKYLYLYKNEIQSIDRQAFKGLASLEQLYLHFNQIETLDPDSFQHLPKLERLFLHNNRITHLVPGTFNHLESMKRLRLDSNTLHCDCEILWLADLLKTYAESGNAQAAAICEYPRRIQGRSVATITPEELNCERPRITSEPQDADVTSGNTVYFTCRAEGNPKPEIIWLRNNNELSMKTDSRLNLLDDGTLMIQNTQETDQGIYQCMAKNVAGEVKTQEVTLRYFGSPARPTFVIQPQNTEVLVGESVTLECSATGHPPPRISWTRGDRTPLPVDPRVNITPSGGLYIQNVVQGDSGEYACSATNNIDSVHATAFIIVQALPQFTVTPQDRVVIEGQTVDFQCEAKGNPPPVIAWTKGGSQLSVDRRHLVLSSGTLRISGVALHDQGQYECQAVNIIGSQKVVAHLTVQPRVTPVFASIPSDTTVEVGANVQLPCSSQGEPEPAITWNKDGVQVTESGKFHISPEGFLTINDVGPADAGRYECVARNTIGSASVSMVLSVNVPDVSRNGDPFVATSIVEAIATVDRAINSTRTHLFDSRPRSPNDLLALFRYPRDPYTVEQARAGEIFERTLQLIQEHVQHGLMVDLNGTSYHYNDLVSPQYLNLIANLSGCTAHRRVNNCSDMCFHQKYRTHDGTCNNLQHPMWGASLTAFERLLKSVYENGFNTPRGINPHRLYNGHALPMPRLVSTTLIGTETVTPDEQFTHMLMQWGQFLDHDLDSTVVALSQARFSDGQHCSNVCSNDPPCFSVMIPPNDSRARSGARCMFFVRSSPVCGSGMTSLLMNSVYPREQINQLTSYIDASNVYGSTEHEARSIRDLASHRGLLRQGIVQRSGKPLLPFATGPPTECMRDENESPIPCFLAGDHRANEQLGLTSMHTLWFREHNRIATELLKLNPHWDGDTIYYETRKIVGAEIQHITYQHWLPKILGEVGMRTLGEYHGYDPGINAGIFNAFATAAFRFGHTLVNPLLYRLDENFQPIAQDHLPLHKAFFSPFRIVNEGGIDPLLRGLFGVAGKMRVPSQLLNTELTERLFSMAHTVALDLAAINIQRGRDHGIPPYHDYRVYCNLSAAHTFEDLKNEIKNPEIREKLKRLYGSTLNIDLFPALVVEDLVPGSRLGPTLMCLLSTQFKRLRDGDRLWYENPGVFSPAQLTQIKQTSLARILCDNADNITRVQSDVFRVAEFPHGYGSCDEIPRVDLRVWQDCCEDCRTRGQFNAFSYHFRGRRSLEFSYQEDKPTKKTRPRKIPSVGRQGEHLSNSTSAFSTRSDASGTNDFREFVLEMQKTITDLRTQIKKLESRLSTTECVDAGGESHANNTKWKKDACTICECKDGQVTCFVEACPPATCAVPVNIPGACCPVCLQKRAEEKP

SEQ ID NO: 11184 - protein, 197 aa, Homo Sapiens
  misc_feature (1)..(1): Xaa can be any naturally occurring amino acid
XGSWFPSAPGLSTTVLLNNNQIKRIPSGAFEDLENLKYLYLYKNEIQSIDRQAFKGLASLEQLYLHFNQIETLDPDSFQHLPKLERLFLHNNRITHLVPGTFNHLESMKRLRLDSNTLHCDCEILWLADLLKTYAESGNAQAAAICEYPRRIQGRSVATITPEELNCERPRITSEPQDADVTSGNTVYFTCRAEGNP

SEQ ID NO: 11185 - protein, 723 aa, Homo Sapiens
  misc_feature (1)..(1): Xaa can be any naturally occurring amino acid
XRGPGRRCLLALVLFCAWGTLAVVAQKPGAGCPSRCLCFRTTVRCMHLLLEAVPAVAPQTSILDLRFNRIREIQPGAFRRLRNLNTLLLNNNQIKRIPSGAFEDLENLKYLYLYKNEIQSIDRQAFKGLASLEQLYLHFNQIETLDPDSFQHLPKLERLFLHNNRITHLVPGTFNHLESMKRLRLDSNTLHCDCEILWLADLLKTYAESGNAQAAAICEYPRRIQGRSVATITPEELNCERPRITSEPQDADVTSGNTVYFTCRAEGNPKPEIIWLRNNNELSMKTDSRLNLLDDGTLMIQNTQETDQGIYQCMAKNVAGEVKTQEVTLRYFGSPARPTFVIQPQNTEVLVGESVTLECSATGHPPPRISWTRGDRTPLPVDPRVNITPSGGLYIQNVVQGDSGEYACSATNNIDSVHATAFIIVQALPQFTVTPQDRVVIEGQTVDFQCEAKGNPPPVIAWTKGGSQLSVDRRHLVLSSGTLRISGVALHDQGQYECQAVNIIGSQKVVAHLTVQPRVTPVFASIPSDTTVEVGANVQLPCSSQGEPEPAITWNKDGVQVTESGKFHISPEGFLTINDVGPADAGRYECVARNTIGSASVSMVLSVNVPDVSRNGDPFVATSIVEAIATVDRAINSTRTHLFDSRPRSPNDLLALFRYPRDPYTVEQARAGEIFERTLQLIQEHVQHGLMVDLNGTSQCQSLFFLLHGLSNGVEHASVKSHS

SEQ ID NO: 11186 - protein, 76 aa, Homo Sapiens
  misc_feature (1)..(1): Xaa can be any naturally occurring amino acid
XVQSDVFRVAEFPHGYGSCDEIPRVDLRVWQDCCEDCRTRGQFNAFSYHFRGRRSLEFSYQEDKPTKKTRPRKIPR

SEQ ID NO: 11187 - protein, 1463 aa, Homo Sapiens
MEPRLFCWTTLFLLAGWCLPGLPCPSRCLCFKSTVRCMHLMLDHIPQVPQQTTVLDLRFNRIREIPGSAFKKLKNLNTLLLNNNHIRKISRNAFEGLENLLYLYLYKNEIHALDKQTFKGLISLEHLYIHFNQLEMLQPETFGDLLRLERLFLHNNKLSKIPAGSFSNLDSLKRLRLDSNALVCDCDLMWLGELLQGFAQHGHTQAAATCEYPRRLHGRAVASVTVEEFNCQSPRITFEPQDVEVPSGNTVYFTCRAEGNPKPEIIWIHNNHSLDLEDDTRLNVFDDGTLMIRNTRESDQGVYQCMARNSAGEAKTQSAMLRYSSLPAKPSFVIQPQDTEVLIGTSTTLECMATGHPHPLITWTRDNGLELDGSRHVATSSGLYLQNITQRDHGRFTCHANNSHGTVQAAANIIVQAPPQFTVTPKDQVVLEEHAVEWLCEADGNPPPVIVWTKTGGQLPVEGQHTVLSSGTLRIDRAAQHDQGQYECQAVSSLGVKKVSVQLTVKPKALAVFTQLPQDTSVEVGKNINISCHAQGEPQPIITWNKEGVQITESGKFHVDDEGTLTIYDAGFPDQGRYECVARNSFGLAVTNMFLTVTAIQGRQAGDDFVESSILDAVQRVDSAINSTRRHLFSQKPHTSSDLLAQFHYPRDPLIVEMARAGEIFEHTLQLIRERVKQGLTVDLEGKEFRYNDLVSPRSLSLIANLSGCTARRPLPNCSNRCFHAKYRAHDGTCNNLQQPTWGAALTAFARLLQPAYRDGIRAPRGLGLPVGSRQPLPPPRLVATVWARAAAVTPDHSYTRMLMHWGWFLEHDLDHTVPALSTARFSDGRPCSSVCTNDPPCFPMNTRHADPRGTHAPCMLFARSSPACASGRPSATVDSVYAREQINQQTAYIDGSNVYGSSERESQALRDPSVPRGLLKTGFPWPPSGKPLLPFSTGPPTECARQEQESPCFLAGDHRANEHLALAAMHTLWFREHNRMATELSALNPHWEGNTVYQEARKIVGAELQHITYSHWLPKVLGDPGTRMLRGYRGYNPNVNAGIINSFATAAFRFGHTLINPILYRLNATLGEISEGHLPFHKALFSPSRIIKEGGIDPVLRGLFGVAAKWRAPSYLLSPELTQRLFSAAYSAAVDSAATIIQRGRDHGIPPYVDFRVFCNLTSVKNFEDLQNEIKDSEIRQKLRKLYGSPGDIDLWPALMVEDLIPGTRVGPTLMCLFVTQFQRLRDGDRFWYENPGVFTPAQLTQLKQASLSRVLCDNGDSIQQVQADVFVKAEYPQDYLNCSEIPKVDLRVWQDCCADCRSRGQFRAVTQESQKKRSAQYSYPVDKDMELSHLRSRQQDKIYVGEDARNVTVLAKTKFSQDFSTFAAEIQETITALREQINKLEARLRQAGCTDVRGVPRKAEERWMKEDCTHCICESGQVTCVVEICPPAPCPSPELVKGTCCPVCRDRGMPSDSPEKR

SEQ ID NO: 11188 - protein, 582 aa, Homo Sapiens
NNLQQPTWGAALTAFARLLQPAYRDGIRAPRGLGLPVGSRQPLPPPRLVATVWARAAAVTPDHSYTRMLMHWGWFLEHDLDHTVPALSTARFSDGRPCSSVCTNDPPCFPMNTRHADPRGTHAPCMLFARSSPACASGRPSATVDSVYAREQINQQTAYIDGSNVYGSSERESQALRDPSVPRGLLKTGFPWPPSGKPLLPFSTGPPTECARQEQESPCFLAGDHRANEHLALAAMHTLWFREHNRMATELSALNPHWEGNTVYQEARKIVGAELQHITYSHWLPKVLGDPGTRMLRGYRGYNPNVNAGIINSFATAAFRFGHTLINPILYRLNATLGEISEGHLPFHKALFSPSRIIKEGGIDPVLRGLFGVAAKWRAPSYLLSPELTQRLFSAAYSAAVDSAATIIQRGRDHGIPPYVDFRVFCNLTSVKNFEDLQNEIKDSEIRQKLRKLYGSPGDIDLWPALMVEDLIPGTRVGPTLMCLFVTQFQRLRDGDRFWYENPGVFTPAQLTQLKQASLSRVLCDNGDSIQQVQADVFVKAEYPQDYLNCSEIPKVDLRVWQDCCADKQAGGTPEAGRVYRC

SEQ ID NO: 11189 - protein, 537 aa, Homo Sapiens
  misc_feature (1)..(1): Xaa can be any naturally occurring amino acid
XAREQINQQTAYIDGSNVYGSSERESQALRDPSVPRGLLKTGFPWPPSGKPLLPFSTGPPTECARQEQESPCFLAGDHRANEHLALAAMHTLWFREHNRMATELSALNPHWEGNTVYQEARKIVGAELQHITYSHWLPKVLGDPGTRMLRGYRGYNPNVNAGIINSFATAAFRFGHTLINPILYRLNATLGEISEGHLPFHKALFSPSRIIKEGGIDPVLRGLFGVAAKWRAPSYLLSPELTQRLFSAAYSAAVDSAATIIQRGRDHGIPPYVDFRVFCNLTSVKNFEDLQNEIKDSEIRQKLRKFWYENPGVFTPAQLTQLKQASLSRVLCDNGDSIQQVQADVFVKAEYPQDYLNCSEIPKVDLRVWQDCCADCRSRGQFRAVTQESQKKRSAQYSYPVDKDMELSHLRSRQQDKIYVGEDARNVTVLAKTKFSQDFSTFAAEIQETITALREQINKLEARLRQAGCTDVRGVPRKAEERWMKEDCTHCICESGQVTCVVEICPPAPCPSPELVKGTCCPVCRDRGMPSDSPEKR

SEQ ID NO: 11190 - protein, 463 aa, Homo Sapiens
MDVLTALLLVHLIPVSTPKNGMSSKSRKRIMPDPVTEPPVTDPVYEALLYCNIPSVAERSMEGHAPHHFKLVSVHVFIRHGDRYPLYVIPKTKRPEIDCTLVANRKPYHPKLEAFISHMSKGSGASFESPLNSLPLYPNHPLCEMGELTQTGVVQHLQNGQLLRDIYLKKHKLLPNDWSADQLYLETTGKSRTLQSGLALLYGFLPDFDWKKIYFRHQPSALFCSGSCYCPVRNQYLEKEQRRQYLLRLKNSQLEKTYGEMAKIVDVPTKQLRAANPIDSMLCHFCHNVSFPCTRNGCVDMEHFKVIKTHQIEDERERREKKLYFGYSLLGAHPILNQTIGRMQRATEGRKEELFALYSAHDVTLSPVLSALGLSEARFPRFAARLIFELWQDREKPSEHSVRILYNGVDVTFHTSFCQDHHKRSPKPMCPLENLVRFVKRDMFVALGGSGTNYYDACHREGF

SEQ ID NO: 11191 - protein, 26 aa, Homo Sapiens
MLFRNRFLLLLALAALLAFVSLSLQF

SEQ ID NO: 11192 - protein, 26 aa, Homo Sapiens
MLFRNRFLLLLALAALLAFVSLSLQF

SEQ ID NO: 11193 - protein, 95 aa, Homo Sapiens
MLFRNRFLLLLALAALLAFVSLSLQFFHLIPVSTPKNGMSSKSRKRIMPDPVTEPPVTDPVYEALLYCNIPSVAERSMEGHAPHHFKLVSVHVFI

SEQ ID NO: 11194 - protein, 145 aa, Homo Sapiens
MLFRNRFLLLLALAALLAFVSLSLQFFHLIPVSTPKNGMSSKSRKRIMPDPVTEPPVTDPVYEALLYCNIPSVAERSMEGHAPHHFKLVSVHVFIRHGDRYPLYVIPKTKRPEIDCTLVANRKPYHPKLEAFISHMSKGSGASFE

SEQ ID NO: 11195 - protein, 480 aa, Homo Sapiens
MLFRNRFLLLLALAALLAFVSLSLQFFHLIPVSTPKNGMSSKSRKRIMPDPVTEPPVTDPVYEALLYCNIPSVAERSMEGHAPHHFKLVSVHVFIRHGDRYPLYVIPKTKRPEIDCTLVANRKPYHPKLEAFISHMSKGSGASFESPLNSLPLYPNHPLCEMGELTQTGVVQHLQNGQLLRDIYLKKHKLLPNDWSADQLYLETTGKSRTLQSGLALLYGFLPDFDWKKIYFRHQPSALFCSGSCYCPVRNQYLEKEQRRQYLLRLKNSQLEKTYGEMAKIVDVPTKQLRAANPIDSMLCHFCHNVSFPCTRNGCVDMEHFKVIKTHQIEDERERREKKLYFGYSLLGAHPILNQTIGRMQRATEGRKEELFALYSAHDVTLSPVLSALGLSEARFPRFAARLIFELWQDREKPSEHSVRILYNGVDVTFHTSFCQDHHKRSPKPMCPLENLVRFVKRDMFVALGGSGTNYYDACHREGF

SEQ ID NO: 11196 - protein, 480 aa, Homo Sapiens; identical to SEQ ID NO: 11195

SEQ ID NO: 11197 - protein, 179 aa, Homo Sapiens
MLFRNRFLLLLALAALLAFVSLSLQFFHLIPVSTPKNGMSSKSRKRIMPDPVTEPPVTDPVYEALLYCNIPSVAERSMEGHAPHHFKLVSVHVFIRHGDRYPLYVIPKTKRPEIDCTLVANRKPYHPKLEAFISHMSKGSGASFESPLNSLPLYPNHPLCEMGELTQTVGLAVHLRGSC

SEQ ID NO: 11198 - protein, 182 aa, Homo Sapiens
MLFRNRFLLLLALAALLAFVSLSLQFFHLIPVSTPKNGMSSKSRKRIMPDPVTEPPVTDPVYEALLYCNIPSVAERSMEGHAPHHFKLVSVHVFIRHGDRYPLYVIPKTKRPEIDCTLVANRKPYHPKLEAFISHMSKGSGASFESPLNSLPLYPNHPLCEMGELTQTVRRWLSASQEERPH

SEQ ID NO: 11199 - protein, 182 aa, Homo Sapiens; identical to SEQ ID NO: 11198

SEQ ID NO: 11200 - protein, 471 aa, Homo Sapiens
MRYFIKSMEHSVCPSSAVHLIPVSTPKNGMSSKSRKRIMPDPVTEPPVTDPVYEALLYCNIPSVAERSMEGHAPHHFKLVSVHVFIRHGDRYPLYVIPKTKRPEIDCTLVANRKPYHPKLEAFISHMSKGSGASFESPLNSLPLYPNHPLCEMGELTQTGVVQHLQNGQLLRDIYLKKHKLLPNDWSADQLYLETTGKSRTLQSGLALLYGFLPDFDWKKIYFRHQPSALFCSGSCYCPVRNQYLEKEQRRQYLLRLKNSQLEKTYGEMAKIVDVPTKQLRAANPIDSMLCHFCHNVSFPCTRNGCVDMEHFKVIKTHQIEDERERREKKLYFGYSLLGAHPILNQTIGRMQRATEGRKEELFALYSAHDVTLSPVLSALGLSEARFPRFAARLIFELWQDREKPSEHSVRILYNGVDVTFHTSFCQDHHKRSPKPMCPLENLVRFVKRDMFVALGGSGTNYYDACHREGF

SEQ ID NO: 11201 - protein, 131 aa, Homo Sapiens
MSSKSRKRIMPDPVTEPPVTDPVYEALLYCNIPSVAERSMEGHAPHHFKLVSVHVFIRHGDRYPLYVIPKTKRPEIDCTLVANRKPYHPKLEAFISHMSKGSGASFESPLNSLPLYPNHPLCEMGELTQTG

SEQ ID NO: 11202 - protein, 442 aa, Homo Sapiens
MSSKSRKRIMPDPVTEPPVTDPVYEALLYCNIPSVAERSMEGHAPHHFKLVSVHVFIRHGDRYPLYVIPKTKRPEIDCTLVANRKPYHPKLEAFISHMSKGSGASFESPLNSLPLYPNHPLCEMGELTQTGVVQHLQNGQLLRDIYLKKHKLLPNDWSADQLYLETTGKSRTLQSGLALLYGFLPDFDWKKIYFRHQPSALFCSGSCYCPVRNQYLEKEQRRQYLLRLKNSQLEKTYGEMAKIVDVPTKQLRAANPIDSMLCHFCHNVSFPCTRNGCVDMEHFKVIKTHQIEDERERREKKLYFGYSLLGAHPILNQTIGRMQRATEGRKEELFALYSAHDVTLSPVLSALGLSEARFPRFAARLIFELWQDREKPSEHSVRILYNGVDVTFHTSFCQDHHKRSPKPMCPLENLVRFVKRDMFVALGGSGTNYYDACHREGF

SEQ ID NO: 11203 - protein, 90 aa, Homo Sapiens
MVFVRRPWPALTTVLLALLVCLGALVDAYPIKPEAPREDASPEELNRYYASLRHYLNLVTRQRYGKRDGPDTLLSKTFFPDGEDRPVRSR

SEQ ID NO: 11204 - protein, 97 aa, Homo Sapiens
MVFVRRPWPALTTVLLALLVCLGALVDAYPIKPEAPREDASPEELNRYYASLRHYLNLVTRQRYGKRDGPDTLLSKTFFPDGEDRPVRSRSEGPDLW

SEQ ID NO: 11205 - protein, 144 aa, Homo Sapiens
MRKDRLLHLCLVLLLILLSASDSNSTEPQYMVLVPSLLHTEAPKKGCVLLSHLNETVTVSASLESGRENRSLFTDLVAEKDLFHCVSFTLPRISASSEVAFLSIQIKGPTQDFRKRNTVLVLNTQSLVFVQTDKPMYKPGQTGK

SEQ ID NO: 11206 - protein, 1482 aa, Homo Sapiens
MRKDRLLHLCLVLLLILLSASDSNSTEPQYMVLVPSLLHTEAPKKGCVLLSHLNETVTVSASLESGRENRSLFTDLVAEKDLFHCVSFTLPRISASSEVAFLSIQIKGPTQDFRKRNTVLVLNTQSLVFVQTDKPMYKPGQTVRFRVVSVDENFRPRNELIPLIYLENPRRNRIAQWQSLKLEAGINQLSFPLSSEPIQGSYRVVVQTESGGRIQHPFTVEEFVLPKFEVKVQVPKIISIMDEKVNITVCGEYTYGKPVPGLATVSLCRKLSRVLNCDKQEVCEEFSQQLNSNGCITQQVHTKMLQITNTGFEMKLRVEARIREEGTDLEVTANRISEITNIVSKLKFVKVDSHFRQGIPFFAQVLLVDGKGVPIPNKLFFISVNDANYYSNATTNEQGLAQFSINTTSISVNKLFVRVFTVHPNLCFHYSWVAEDHQGAQHTANRVFSLSGSYIHLEPVAGTLPCGHTETITAHYTLNRQAMGELSELSFHYLIMAKGVIVRSGTHTLPVESGDMKGSFALSFPVESDVAPIARMFIFAILPDGEVVGDSEKFEIENCLANKVDLSFSPAQSPPASHAHLQVAAAPQSLCALRAVDQSVLLMKPEAELSVSSVYNLLTVKDLTNFPDNVDQQEEEQGHCPRPFFIHNGAIYVPLSSNEADIYSFLKGMGLKVFTNSKIRKPKSCSVIPSVSAGAVGQGYYGAGLGVVERPYVPQLGTYNVIPLNNEQSSGPVPETVRSYFPETWIWELVAVNSSGVAEVGVTVPDTITEWKAGAFCLSEDAGLGISSTASLRAFQPFFVELTMPYSVIRGEVFTLKATVLNYLPKCIRVSVQLKASPAFLASQNTKGEESYCICGNERQTLSWTVTPKTLGNVNFSVSAEAMQSLELCGNEVVEVPEIKRKDTVIKTLLVEAEGIEQEKTFSSMTCASGANVSEQLSLKLPSNVVKESARASFSVLGDILGSAMQNIQNLLQMPYGCGEQNMVLFAPNIYVLNYLNETQQLTQEIKAKAVGYLITGYQRQLNYKHQDGSYSTFGERYGRNQGNTWLTAFVLKTFAQARSYIFIDEAHITQSLTWLSQMQKDNGCFRSSGSLLNNAIKGGVEDEATLSAYVTIALLEIPLPVTNPIVRNALFCLESAWNVAKEGTHGSHVYTKALLAYAFSLLGKQNQNREILNSLDKEAVKEDNLVHWERPQRPKAPVGHLYQTQAPSAEVEMTSYVLLAYLTAQPAPTSGDLTSATNIVKWIMKQQNAQGGFSSTQDTVVALHALSRYGAATFTRTEKTAQVTVQDSQTFSTNFQVDNNNLLLLQQISLPELPGEYVITVTGERCVYLQTSMKYNILPEKEDSPFALKVQTVPQTCDGHKAHTSFQISLTISYTGNRPASNMVIVDVKMVSGFIPLKPTVKMLERSSSVSRTEVSNNHVLIYVEQVTNQTLSFSFMVLQDIPVGDLKPAIVKVYDYYETDESVVAEYIAPCSTDTEHGNV

SEQ ID NO: 11207 - protein, 284 aa, Homo Sapiens
MAGGRHRRVVGTLHLLLLVAALPWASRGVSPSASAWPEEKHIMQRIQRLQADWVLEIDTFLSQTPYGYRSFSNIISTLNPTAKRHLVLACHYDSKYFSHWNNRVFVGATDSAVPCAMMLELARALDKKLLSLKTVSDSKPDLSLQLIFFDGEEAFLHWSPQDSLYGSRHLAAKMASTPHPPGARGTSQLHGMDLLVLLDLIGAPNPTFPNFFPNSARWFERLQAIEHELHELGLLKDHSLEGRYFQNYSYGGVIQDDHIPFLRRGVPVLHLIPSPFPEVWHTMD

SEQ ID NO: 11208 - protein, 361 aa, Homo Sapiens
MAGGRHRRVVGTLHLLLLVAALPWASRGVSPSASAWPEEKNYHQPAILNSSALRQIAEGTSISEMWQNDLQPLLIERYPGSPGSYAARQHIMQRIQRLQADWVLEIDTFLSQTPYGYRSFSNIISTLNPTAKRHLVLACHYDSKYFSHWNNRVFVGATDSAVPCAMMLELARALDKKLLSLKTVSDSKPDLSLQLIFFDGEEAFLHWSPQDSLYGSRHLAAKMASTPHPPGARGTSQLHGMDLLVLLDLIGAPNPTFPNFFPNSARWFERLQAIEHELHELGLLKDHSLEGRYFQNYSYGGVIQDDHIPFLRRGVPVLHLIPSPFPEVWHTMDDNEENLDESTIDNLNKILQVFVLEYLHL

SEQ ID NO: 11209 - protein, 118 aa, Homo Sapiens [sequence omitted]

SEQ ID NO: 11210 - protein, 149 aa, Homo Sapiens
MDAEGLALLLPPVTLAALVDSWLREDCPGLNYAALAVRAARQAADFTLKVEVECSSLQEAVQAAEAGADLVLLDNFKPEELHPTATVLKAQFPSVAVEASGGITLDNLPQFCGPHIDVISMGMLTQAAPALDFSLKLFAKEVAPVPKIH

SEQ ID NO: 11211 - protein, 297 aa, Homo Sapiens
MDAEGLALLLPPVTLAALVDSWLREDCPGLNYAALVSGAGPSQAALWAKSPGVLAGQPFFDAIFTQLNCQVSWFLPEGSKLVPVARVAEVRGPAHCLLLGERVALNTLARCSGIASAAAAAVEAARGAGWTGHVAGTRKTTPGFRLVEKYGLLVGGAASHRYDLGGLVMVKDNHVVAAGGVEKAVRAARQAADFTLKVEVECSSLQEAVQAAEAGADLVLLDNFKPEELHPTATVLKAQFPSVAVEASGGITLDNLPQFCGPHIDVISMGMLTQAAPALDFSLKLFAKEVAPVPKIH

SEQ ID NO: 11212 - protein, 136 aa, Homo Sapiens
MVRPYPLIYFLFLPLGACFPLLDRREPTDAMGGLGAGERWADLAMGPRPHSVWGSSRWLRASQPQALLVIARGLQTSGREHAGCRFRFGRQDEGSEATGFLPAAGEKTSGPLGNLAEELNGYSRKKGGFSFRFGRR

SEQ ID NO: 11213 - protein, 136 aa, Homo Sapiens; identical to SEQ ID NO: 11212

SEQ ID NO: 11214 - protein, 155 aa, Homo Sapiens
MRRCNSGSGPPPSLLLLLLWLLAVPGANAAPRSALYSPSDPLTLLQADTVRGAVLGSRSAWAVEFFASWCGHCIAFAPTWKALAEDVKAWRPALYLAALDCAEETNSAVCRDFNIPGFPTVRFFKAFTKNGSGAVFPGWRRLMDSLREITKSTWL

SEQ ID NO: 11215 - protein, 747 aa, Homo Sapiens
MRRCNSGSGPPPSLLLLLLWLLAVPGANAAPRSALYSPSDPLTLLQADTVRGAVLGSRSAWAVEFFASWCGHCIAFAPTWKALAEDVKAWRPALYLAALDCAEETNSAVCRDFNIPGFPTVRFFKAFTKNGSGAVFPVAGADVQTLRERLIDALESHHDTWPPACPPLEPAKLEEIDGFFARNNEEYLALIFEKGGSYLGREVALDLSQHKGVAVRRVLNTEANVVRKFGVTDFPSCYLLFRNGSVSRVPVLMESRSFYTAYLQRLSGLTREAAQTTVAPTTANKIAPTVWKLADRSKIYMADLESALHYILRIEVGRFPVLEGQRLVALKKFVAVLAKYFPGRPLVQNFLHSVNEWLKRQKRNKIPYSFFKTALDDRKEGAVLAKKVNWIGCQGSEPHFRGFPCSLWVLFHFLTVQAARQNVDHSQEAAKAKEVLPAIRGYVHYFFGCRDCASHFEQMAAASMHRVGSPNAAVLWLWSSHNRVNARLAGAPSEDPQFPKVQWPPRELCSACHNERLDVPVWDVEATLNFLKAHFSPSNIILDFPAAGSAARRDVQNVAAAPELAMGALELESRNSTLDPGKPEMMKSPTNTTPHVPAEGPEASRPPKLHPGLRAAPGQEPPEHMAELQRNEQEQPLGQWHLSKRDTGAALLAESRAEKNRLWGPLEVRRVGRSSKQLVDIPEGQLEARAGRGRGQWLQVLGGGFSYLDISLCVGLYSLSFMGLLAMYTYFQAKIRALKGHAGHPAA

SEQ ID NO: 11216 - protein, 604 aa, Homo Sapiens
MRRCNSGSGPPPSLLLLLLWLLAVPGANAAPRSALYSPSDPLTLLQADTVRGAVLGSRSAWAVEFFASWCGHCIAFAPTWKALAEDVKAWRPALYLAALDCAEETNSAVCRDFNIPGFPTVRFFKAFTKNGSGAVFPVAGADVQTLRERLIDALESHHDTWPPACPPLEPAKLEEIDGFFARNNEEYLALIFEKGGSYLGREVALDLSQHKGVAVRRVLNTEANVVRKFGVTDFPSCYLLFRNGSVSRVPVLMESRSFYTAYLQRLSGLTREAAQTTVAPTTANKIAPTVWKLADRSKIYMADLESALHYILRIEVGRFPVLEGQRLVALKKFVAVLAKYFPGRPLVQNFLHSVNEWLKRQKRNKIPYSFFKTALDDRKEGAVLAKKVNWIGCQGSEPHFRGFPCSLWVLFHFLTVQAARQNVDHSQEAAKAKEVLPAIRGYVHYFFGCRDCASHFEQMAAASMHRVGSPNAAVLWLWSSHNRVNARLAGAPSEDPQFPKVQWPPRELCSACHNERLDVPVWDVEATLNFLKAHFSPSNIILDFPAAGSAARRDVQNVAAAPELAMGALELESRNSTLDPGKPEMMKSPTNTTPHVPAEGPELI

SEQ ID NO: 11217 - protein, 72 aa, Homo Sapiens
  misc_feature (1)..(1): Xaa can be any naturally occurring amino acid
XNEQEQPLGQWHLSKRDTGAALLAESRAEKNRLWGPLEVRRVGRSSKQLVDIPEGQLEARAGRGRGQWLQLI

SEQ ID NO: 11218 - protein, 253 aa, Homo Sapiens
MPLLPSTVGLAGLLFWAGQAVNALIMPNATPAPAQPESTAMRLLSGLEVPRYRRKRHISVRDMNALLDYHNHIRASVYPPAANMEYMVWDKRLARAAEAWATQCIWAHGPSQLMRYVGQNLSIHSGQYRSVVDLMKSWSEEKWHYLFPAPRDCNPHCPWRCDGPTCSHYTQMVWASSNRLGCAIHTCSSISVWGNTWHRAAYLVCNYAIKGNWIGESPYKMGKPCSSCPPSYQGSCNSNMCFKGLKSNKFTWF

SEQ ID NO: 11219 - protein, 190 aa, Homo Sapiens
MLVGDSGVGKTCLLVRFKDGAFLAGTFISTVGIDFRNKVLDVDGVKVKLQMWDTAGQERFRSVTHAYYRDAHALLLLYDVTNKASFDNIQAWLTEIHEYAQHDVALMLLGNKVDSAHERVVKREDGEKLAKEYGLPFMETSAKTGLNVDLAFTAIAKELKQRSMKAPSEPRFRLHDYVKREGRGASCCRP

SEQ ID NO: 11220 - protein, 64 aa, Homo Sapiens
MLVGDSGVGKTCLLVRFKDGAFLAGTFISTVGIDFRQGLTLSPWLECSGDHGGLQPPTSGFKPS

SEQ ID NO: 11221 - protein, 256 aa, Homo Sapiens
MSRKKTPKSKGASTPAASTLPTANGARPARSGTALSGPDAPPNGPLQPGRPSLGGGVDFYDVAFKVMLVGDSGVGKTCLLVRFKDGAFLAGTFISTVGIDFRNKVLDVDGVKVKLQMWDTAGQERFRSVTHAYYRDAHALLLLYDVTNKASFDNIQAWLTEIHEYAQHDVALMLLGNKVDSAHERVVKREDGEKLAKEYGLPFMETSAKTGLNVDLAFTAIAKELKQRSMKAPSEPRFRLHDYVKREGRGASCCRP

SEQ ID NO: 11222 - protein, 136 aa, Homo Sapiens
  misc_feature (1)..(1): Xaa can be any naturally occurring amino acid
XKEYGLPFMETSAKTGLNVDLAFTAIANNSPNKQASESPWPHTGRHGKAVFCTGRGAASGQTLPRCSAAPSWARPGEGGLGLAPRTVPNPRKAMSSAAHAQAAKGGRLPTPGTEGFTANHIVHLCVLGAACSRPTL

SEQ ID NO: 11223 - protein, 311 aa, Homo Sapiens
MVIAGASWMLGRAAASPTQTPPTTSTIRVARRSRVALVAMVIAAAGSGGPGRAEPQLSQPSLDCGRMRSSLTPLGPPVSRDRVIASFPKWYTPEACLQLREHFHGQVSAACQRRNTGTVGFCKNVFDRDYKATIGVDFEIERFEIAGIPYSLQIWDTAGQEKFKCIASAYYRGAQVIITAFDLTDVQTLEHTRQWLEDALRENEAGSCFIFLVGTKKDLLSGAACEQAEADAVHLAREMQAEYWSVSAKTGENVKAFFSRVAALAFEQSVLQDLERQSSARLQVGNGDLIQMEGSPPETQESKRPSSLGCC

SEQ ID NO: 11224 - protein, 333 aa, Homo Sapiens
MVIAGASWMLGRAAASPTQTPPTTSTIRVARRSRVALVAMVIAAAGSGGPGRAEPQLSQPSLDCGRMRSSLTPLGPPVSRDRVIASFPKWYTPEACLQLREHFHGQVSAACQRRNTGTVGLKLSKVVVVGDLYVGKTSLIHRFCKNVFDRDYKATIGVDFEIERFEIAGIPYSLQIWDTAGQEKFKCIASAYYRGAQVIITAFDLTDVQTLEHTRQWLEDALRENEAGSCFIFLVGTKKDLLSGAACEQAEADAVHLAREMQAEYWSVSAKTGENVKAFFSRVAALAFEQSVLQDLERQSSARLQVGNGDLIQMEGSPPETQESKRPSSLGCC

SEQ ID NO: 11225 - protein, 132 aa, Homo Sapiens
  misc_feature (1)..(1): Xaa can be any naturally occurring amino acid
XVSAACQRRNTGTVGLKLSKVVVVGDLYVGKTSLIHRFCKNVFDRDYKATIGVDFEIERFEIAGIPYSLQIWDTAGQEKFKCIASAYYRGAQGEQHATSGLNCMQQRGPCRAPQWESRVLCTGTSFLSSKTH

SEQ ID NO: 11226 - protein, 201 aa, Homo Sapiens
MSGKSLLLKVILLGDGGVGKSSLMNRYVTNKFDSQAFHTIGVEFLNRDLEVDGRFVTLQIWDTAGQERFKSLRTPFYRGADCCLLTFSVDDRQSFENLGNWQKEFIYYADVKDPEHFPFVVLGNKVDKEDRQVTTEEAQTWCMENGDYPYLETSAKDDTNVTVAFEEAVRQVLAVEEQLEHCMLGHTIDLNSGSKAGSSCC

SEQ ID NO: 11227 - protein, 80 aa, Homo Sapiens
MRRISLTSSPVRLLLFLLLLLIALEIMVGGHSLCFNFTIKSLSRPGQPWCEAQVFLNKNLFLQYNSDNNMVKPLGLLGKK

SEQ ID NO: 11228 - protein, 117 aa, Homo Sapiens
MRRISLTSSPVRLLLFLLLLLIALEIMVGGHSLCFNFTIKSLSRPGQPWCEAQVFLNKNLFLQYNSDNNMVKPLGLLGKKILPLCKSRCFVNVKQNGALVHPGSSPPMERNPSSLTQ

SEQ ID NO: 11229 - protein, 209 aa, Homo Sapiens
MRRISLTSSPVRLLLFLLLLLIALEIMVGGHSLCFNFTIKSLSRPGQPWCEAQVFLNKNLFLQYNSDNNMVKPLGLLGKKVYATSTWGELTQTLGEVGRDLRMLLCDIKPQIKTSDPSTLQVEMFCQREAERCTGASWQFATNGEKSLLFDAMNMTWTVINHEASKIKETWKKDRGLEKYFRKLSKGDCDHWLREFLGHWEAMPEPTGN

SEQ ID NO: 11230 - protein, 212 aa, Homo Sapiens
MRRISLTSSPVRLLLFLLLLLIALEIMVGGHSLCFNFTIKSLSRPGQPWCEAQVFLNKNLFLQYNSDNNMVKPLGLLGKKVYATSTWGELTQTLGEVGRDLRMLLCDIKPQIKTSDPSTLQVEMFCQREAERCTGASWQFATNGEKSLLFDAMNMTWTVINHEASKIKETWKKDRGLEKYFRKLSKGDCDHWLREFLGHWEAMPEPTGRRST

SEQ ID NO: 11231 - protein, 263 aa, Homo Sapiens
MRRISLTSSPVRLLLFLLLLLIALEIMVGGHSLCFNFTIKSLSRPGQPWCEAQVFLNKNLFLQYNSDNNMVKPLGLLGKKVYATSTWGELTQTLGEVGRDLRMLLCDIKPQIKTSDPSTLQVEMFCQREAERCTGASWQFATNGEKSLLFDAMNMTWTVINHEASKIKETWKKDRGLEKYFRKLSKGDCDHWLREFLGHWEAMPEPTVSPVNASDIHWSSSSLPDRWIILGAFILLVLMGIVLICVWWQNGEWQAGLWPLRTS

SEQ ID NO: 11232 - protein, 227 aa, Homo Sapiens
MRRISLTSSPVRLLLFLLLLLIALEIMYNSDNNMVKPLGLLGKKVYATSTWGELTQTLGEVGRDLRMLLCDIKPQIKTSDPSTLQVEMFCQREAERCTGASWQFATNGEKSLLFDAMNMTWTVINHEASKIKETWKKDRGLEKYFRKLSKGDCDHWLREFLGHWEAMPEPTVSPVNASDIHWSSSSLPDRWIILGAFILLVLMGIVLICVWWQNGEWQAGLWPLRTS

SEQ ID NO: 11233 - protein, 334 aa, Homo Sapiens
MAAAASPAFLLRLPLLLLLSSWCRTGLADPHSLCYDITVIPKFRPGPRWCAVQGQVDEKTFLHYDCGSKTVTPVSPLGKKLNVTTAWKAQNPVLREVVDILTEQLLDIQLENYIPKEPLTLQARMSCEQKAEGHGSGSWQLSFDGQIFLLFDSENRMWTTVHPGARKMKEKWENDKDMTMSFHYISMGDCTGWLEDFLMGMDSTLEPSAGAPPTMSSGTAQPRATATTLILCCLLIMCLLICSRHSLTQSHGHHPQSLQPPPHPPLLHPTWLLRRVLWSDSYQIAKRPLSGGHVTRVTLPIIGDDSHSLPCPLALYTINNGAARYSEPLQVSIS

SEQ ID NO: 11234 - protein, 221 aa, Homo Sapiens
MAAAASPAFLLRLPLLLLLSSWCRTGLADPHSLCYDITVIPKFRPGPRWCAVQGQVDEKTFLHYDCGSKTVTPVSPLGKKLNVTTAWKAQNPVLREVVDILTEQLLDIQLENYIPKEPLTLQARMSCEQKAEGHGSGSWQLSFDGQIFLLFDSENRMWTTVHPGARKMKEKWENDKDMTMSFHYISMGDCTGWLEDFLMGMDSTLEPSAGGNRRKRNGDLQ

SEQ ID NO: 11235 - protein, 213 aa, Homo Sapiens
MAAAASPAFLLRLPLLLLLSSWCRTGLADPHSLCYDITVIPKFRPGPRWCAVQGQVDEKTFLHYDCGSKTVTPVSPLGKKLNVTTAWKAQNPVLREVVDILTEQLLDIQLENYIPKEPLTLQARMSCEQKAEGHGSGSWQLSFDGQIFLLFDSENRMWTTVHPGARKMKEKWENDKDMTMSFHYISMGDCTGWLEDFLMGMDSTLEPSAGGTV

SEQ ID NO: 11236 - protein, 180 aa, Homo Sapiens
MASLRVERAGGPRLPRTRVGRPAALRLLLLLGAVLNPHEALAQPLPTTGTPGSEASVPTGGTVKNYETAVQFCWNHYKDQMDPIEKDWCDWAMISRPYSTLRDCLEHFAELFDLGFPNPLAERIIFETHQIHFANCSLVQPTFSDPPEDVLLAMIIAPICLIPFLITLVVWRSKDSEAQA

SEQ ID NO: 11237 - protein, 175 aa, Homo Sapiens
MASLRVERAGGPRLPRTRVGRPAALRLLLLLGAVLNPHEALAQPLPTTGTPGSEGGTVKNYETAVQFCWNHYKDQMDPIEKDWCDWAMISRPYSTLRDCLEHFAELFDLGFPNPLAERIIFETHQIHFANCSLVQPTFSDPPEDVLLAMIIAPICLIPFLITLVVWRSKDSEAQA

SEQ ID NO: 11238 - protein, 112 aa, Homo Sapiens
MASLRVERAGGPRLPRTRVGRPAALRLLLLLGAVLNPHEALAQPLPTTGTPGSEGLIAPCEIAWSTLQSCLTWASPIPWQRGSSLRLTRSTLPTAPWCSPPSLTPQRMYSWP

SEQ ID NO: 11239 - protein, 49 aa, Homo Sapiens
MDPIEKDWCDWAMISRPYSTLRDCLEHFAELFDLGFPNPLAERIIFETH

SEQ ID NO: 11240 - protein, 100 aa, Homo Sapiens
MDPIEKDWCDWAMISRPYSTLRDCLEHFAELFDLGFPNPLAERIIFETHQIHFANCSLVQPTFSDPPEDVLLAMIIAPICLIPFLITLVVWRSKDSEAQA

SEQ ID NO: 11241 - protein, 730 aa, Homo Sapiens
MAIGVWQLLLDMGIMLSVDQHLYFQDTYVFYQFSSDECSYLYCEFEREEEWQNGVKLLLQLVPLIPARGGICELSHQKIEDSEESSDEILVRLTSAVQRELAAVIALKARKSAIEQDEENNDKHVAVTEAESVPDSQAGVMCKLQERDEIGRIELVQKLAKENYQFLQTDKKEQEKSEHQDDEVTTVQVKEQDQSVLVLKKVQCCGPAPTAGSAESHWRYVVVSGTPEKILEHLLNDLHLEEVQDKETETLLDDFLLTYTVFMTTDDLCQALLRHYSAKKYQGKEENSDVPRRKRKVLHLVSQWIALYKDWLPEDEHSKMFLKTIYRNVLDDVYEYPILEKELKEFQKILGMHRRHTVDEYSPQKKNKALFHQFSLKENWLQHRGTVTETEEIFCHVYITEHSYVSVKAKVSSIAQEILKVVAEKIQYAEEDLALVAITFSGEKHELQPNDLVISKSLEASGRIYVYRKDLADTLNPFAENEESQQRSMRILGMNTWDLALELMNFDWSLFNSIHEQELIYFTFSRQGSGEHTANLSLLLQRCNEVQLWVATEILLCSQLGKRVQLVKKFIKIAAHCKAQRNLNSFFAIVMGLNTASVSRLSQTWEKIPGKFKKLFSELESLTDPSLNHKAYRDAFKKMKPPKIPFMPLLLKDVTFIHEGNKTFLDNLVNFEKLHMIADTVRTLRHCRTNQFGDLSPKEHQELKSYVNHLYVIDSQQALFELSHRIEPRV

SEQ ID NO: 11242 - protein, 580 aa, Homo Sapiens
MGSSRLRVFDPHLERKDSAAALSDRELPLPTFDVPYFKYIDEEDEDDEWSSRSQSSTEDDSVDSLLSDRYVVVSGTPEKILEHLLNDLHLEEVQDKETETLLDDFLLTYTVFMTTDDLCQALLRHYSAKKYQGKEENSDVPRRKRKVLHLVSQWIALYKDWLPEDEHSKMFLKTIYRNVLDDVYEYPILEKELKEFQKILGMHRRHTVDEYSPQKKNKALFHQFSLKENWLQHRGTVTETEEIFCHVYITEHSYVSVKAKVSSIAQEILKVVAEKIQYAEEDLALVAITFSGEKHELQPNDLVISKSLEASGRIYVYRKDLADTLNPFAENEESQQRSMRILGMNTWDLALELMNFDWSLFNSIHEQELIYFTFSRQGSGEHTANLSLLLQRCNEVQLWVATEILLCSQLGKRVQLVKKFIKIAAHCKAQRNLNSFFAIVMGLNTASVSRLSQTWEKIPGKFKKLFSELESLTDPSLNHKAYRDAFKKMKPPKIPFMPLLLKDVTFIHEGNKTFLDNLVNFEKLHMIADTVRTLRHCRTNQFGDLSPKEHQELKSYVNHLYVIDSQQALFELSHRIEPRV

SEQ ID NO: 11243 - protein, 444 aa, Homo Sapiens
MGSSRLRVFDPHLERKDSAAALSDRELPLPTFDVPYFKYIDEEDEDDEWSSRSQSSTEDDSVDSLLSDRYVVVSGTPEKILEHLLNDLHLEEVQDKETETLLDDFLLTYTVFMTTDDLCQALLRHYSAKKYQGKEENSDVPRRKRKVLHLVSQWIALYKDWLPEDEHSKMFLKTIYRNVLDDVYEYPILEKELKEFQKILGMHRRHTVDEYSPQKKNKALFHQFSLKENWLQHRGTVTETEEIFCHVYITEHSYVSVKAKVSSIAQEILLCSQLGKRVQLVKKFIKIAAHCKAQRNLNSFFAIVMGLNTASVSRLSQTWEKIPGKFKKLFSELESLTDPSLNHKAYRDAFKKMKPPKIPFMPLLLKDVTFIHEGNKTFLDNLVNFEKLHMIADTVRTLRHCRTNQFGDLSPKEHQELKSYVNHLYVIDSQQALFELSHRIEPRV

SEQ ID NO: 11244 - protein, 124 aa, Homo Sapiens
MGSSRLRVFDPHLERKDSAAALSDRELPLPTFDVPYFKYIDEEDEDDEWSSRSQSSTEDDSVDSLLSDRYVVVSGTPEKILEHLLNDLHLEEVQDKETVIPTPGITCVTSAMCSQSQADQDFMA

SEQ ID NO: 11245 - protein, 400 aa, Homo Sapiens
MRMAVGSVKMQPPCESPALAAAAAVVAADGPLRRSPSAREPEREQPPASLRPRLRDLPALLRSGLTLRRKRSAAGGRTLSRRISNPYLEHTPSQIYGENSSCAGRALRNIIIVQAADLIKDRVNLKGFYRRSCVGSELVDWLLEHCPFVQCRSMAIGVWQLLLDMGIMLSVDQHLYFQDTYVFYQFSSDECSYLYCEFEREEEWQNGVKLLLQLVPLIPARGGICELSHQKIEDSEESSDEILVRLTSAVQRELAAVIALKARKSAIEQDEENNDKHVAVTEAESVPDSQAGVMCKLQERDEIGRIELVQKLAKENYQFLQTDKKEQEKSEHQDDEVTTVQVKEQDQSVLVLKKVQCCGPAPTAGSAESHWSVLADCRALSSQMDSVPSERTGMARSFSI

SEQ ID NO: 11246 - protein, 155 aa, Homo Sapiens
MSWDCGFKYIFAFSPTLKAGVMCKLQERDEIGRIELVQKLAKENYQFLQTDKKEQEKSEHQDDEVTTVQVKEQDQSVLVLKKVQCCGPAPTAGSAESHWRYVVVSGTPEKILEHLLNDLHLEEVQDKETETLLDDFLLTYTVFMTTDDLCQALLR

SEQ ID NO: 11247 - protein, 142 aa, Homo Sapiens
MTTDDLCQALLRHYSAKKYQGKEENSDVPRRKRKVLHLVSQWIALYKDWLPEDEHSKMFLKTIYRNVLDDVYEYPILEKELKEFQKILGMHRRHTVDEYSPQKKNKALFHQFSLKENWLQHRGTVTETEEIFCHVYITEHSY

SEQ ID NO: 11248 - protein, 294 aa, Homo Sapiens
MQPRRQRLPAPWSGPRGPRPTAPLLALLLLLAPVAAPAGSGDPDDPGQPQDAGVPRRLLQQAARAALHFFNFRSGSPSALRVLAEVQEGRAWINPKEGCKVHVVFSTERYNPESLLQEGEGRLGKCSARVFFKNQKPRPTINVTCTRLIEKKKRQQEDYLLYKQMKQLKNPLEIVSIPDNHGHIDPSLRLIWDLAFLGSSYVMWEMTTQVSHYYLAQLTSVRQWKTNDDTIDFDYTVLLHELSTQEIIPCRIHLVWYPGKPLKVKYHCQELQTPEEASGTEEGSAVVPTELSNF

SEQ ID NO: 11249 - protein, 228 aa, Homo Sapiens
MQPRRQRLPAPWSGPRGPRPTAPLLALLLLLAPVAAPAGSGDPDDPGQPQDAGVPRRLLQQAARAALHFFNFRSGSPSALRVLAEVQEGRAWINPKEGCKVHVVFSTERYNPESLLQEGEGRLGKCSARVFFKNQKPRPTINVTCTRLIEKKKRQQEDYLLYKQMKQLKNPLEIVSIPDNHGHIDPSLRLIWDLAFLGSSYVMWEMTTQVSHYYLAQLTSVRQWVRKT

SEQ ID NO: 11250 - protein, 163 aa, Homo Sapiens
MRRLLIPLALWLGAVGVGVAELTEAQRRGLQVALEEFHKHPPVQWAFQETSVESAVDTPFPAGIFVRLEFKLQQTSCRKRDWKKPECKVRPNGRKRKCLACIKLGSEDKVLGRLVHCPIETQVLREAEEHQETQCLRVQRAGEDPHSFYFPGQFAFSKALPRS

SEQ ID NO: 11251 - protein, 163 aa, Homo Sapiens; identical to SEQ ID NO: 11250

SEQ ID NO: 11252 - protein, 163 aa, Homo Sapiens; identical to SEQ ID NO: 11250

SEQ ID NO: 11253 - protein, 159 aa, Homo Sapiens
MRRLLIPLALWLGAVGVGVAELTEAQRRGLQVALEEFHKHPPVQWAFQETSVESAVDTPFPAGIFVRLEFKLQQTSCRKRDWKKPECKVRPNGRKRKCLACIKLGSEDKVLGRLVHCPIETQVLRRCVVPPGPLRVVTSGRPQPPGRGTRSIPSHDNKA

SEQ ID NO: 11254 - protein, 47 aa, Homo Sapiens
MAAAAPAAAAASSEAPAASATAEPEAGDQDSREVKQKIYCHILDPTK

SEQ ID NO: 11255 - protein, 849 aa, Homo Sapiens
MAAAAPAAAAASSEAPAASATAEPEAGDQDSREVRVLQSLRGKICEAKNLLPYLGPHKMRDCFCTINLDQEEVYRTQVVEKSLSPFFSEEFYFEIPRTFQYLSFYVYDKNVLQRDLRIGKVAIKKEDLCNHSGKETWFSLQPVDSNSEVQGKVHLELKLNELITENGTVCQQLVVHIKACHGLPLINGQSCDPYATVSLVGPSRNDQKKTKVKKKTSNPQFNEIFYFEVTRSSSYTRKSQFQVEEEDIEKLEIRIDLWNNGNLVQDVFLGEIKVPVNVLRTDSSHQAWYLLQPRDNGNKSSKTDDLGSLRLNICYTEDYVLPSEYYGPLKTLLLKSPDVQPISASAAYILSEICRDKNDAVLPLVRLLLHHDKLVPFATAVAELDLKDTQDANTIFRGNSLATRCLDEMMKIVGGHYLKVTLKPILDEICDSSKSCEIDPIKLKEGDNVENNKENLRYYVDKLFNTIVKSSMSCPTVMCDIFYSLRQMATQRFPNDPHVQYSAVSSFVFLRFFAVAVVSPHTFHLRPHHPDAQTIRTLTLISKTIQTLGSWGSLSKSKSSFKETFMCEFFKMFQEEGYIIAVKKFLDEISSTETKESSGTSEPVHLKEGEMYKRAQGRTRIGKKNFKKRWFCLTSRELTYHKQPGKDAIYTIPVKNILAVEKLEESSFNKKNMFQVIHTEKPLYVQANNCVEANEWIDVLCRVSRCNQNRLSFYHPSVYLNGNWLCCQETGENTLGCKPCTAGVPADIQIDIDEDRETERIYSLFTLSLLKLQKMEEACGTIAVYQGPQKEPDDYSNFVIEDSVTTFKTIQQIKSIIEKLDEPHEKYRKKRSSSAKYGSKENPIVGKAS

SEQ ID NO: 11256 - protein, 853 aa, Homo Sapiens [sequence omitted]

SEQ ID NO: 11257 - protein, 155 aa, Homo Sapiens
MAPRTWCPAGIFGLFCPLTLACSSLTIALTDCQPIILVSPTLSLWMVVRSVWIMQASLLGEPEEVALGPMGVVAATLEVVGTRAMGVAGIMTVDLEGMDMDMDVPETIMAETRVVMTATQEEITETIMTTEMRHAHNIGETWISALSEPVCHTLS

SEQ ID NO: 11258 - protein, 157 aa, Homo Sapiens
MSSEEGKLFVGGLNFNTDEQALEDHFSSFGPISEVVVVKDRETQRSRGFGFITFTNPEHASVAMRAMNGESLDGRQIRVDHAGKSARGTRGGGFGAHGRGRSYSRGGGDQGYGSGRYYDSRPGGYGYGYGRSRDYNGRNQGGYDRYSGGNYRDNYDN

SEQ ID NO: 11259 - protein, 157 aa, Homo Sapiens; identical to SEQ ID NO: 11258

SEQ ID NO: 11260 - protein, 1247 aa, Homo Sapiens
MMREWVLLMSVLLCGLAGPTHLFQPSLVLDMAKVLLDNYCFPENLLGMQEAIQQAIKSHEILSISDPQTLASVLTAGVQSSLNDPRLVISYEPSTPEPPPQVPALTSLSEEELLAWLQRGLRHEVLEGNVGYLRVDSVPGQEVLSMMGEFLVAHVWGNLMGTSALVLDLRHCTGGQVSGIPYIISYLHPGNTILHVDTIYNRPSNTTTEIWTLPQVLGERYGADKDVVVLTSSQTRGVAEDIAHILKQMRRAIVVGERTGGGALDLRKLRIGESDFFFTVPVSRSLGPLGGGSQTWEGSGVLPCVGTPAEQALEKALAILTLRSALPGVVHCLQEVLKDYYTLVDRVPTLLQHLASMDFSTVVSEEDLVTKLNAGLQAASEDPRLLVRAIGPTETPSWPAPDAAAEDSPGVAPELPEDEAIRQALVDSVFQVSVLPGNVGYLRFDSFADASVLGVLAPYVLRQVWEPLQDTEHLIMDLRHNPGGPSSAVPLLLSYFQGPEAGPVHLFTTYDRRTNITQEHFSHMELPGPRYSTQRGVYLLTSHRTATAAEEFAFLMQSLGWATLVGEITAGNLLHTRTVPLLDTPEGSLALTVPVLTFIDNHGEAWLGGGVVPDAIVLAEEALDKAQEVLEFHQSLGALVEGTGHLLEAHYARPEVVGQTSALLRAKLAQGAYRTAVDLESLASQLTADLQEVSGDHRLLVFHSPGELVVEEAPPPPPAVPSPEELTYLIEALFKTEVLPGQLGYLRFDAMAELETVKAVGPQLVRLVWQQLVDTAALVIDLRYNPGSYSTAIPLLCSYFFEAEPRQHLYSVFDRATSKVTEVWTLPQVAGQRYGSHKDLYILMSHTSGSAAEAFAHTMQDLQRATVIGEPTAGGALSVGIYQVGSSPLYASMPTQMAMSATTGKAWDLAGVEPDITVPMSEALSIAQDIVALRAKVPTVLQTAGKLVADNYASAELGAKMATKLSGLQSRYSRVTSEVALAEILGADLQMLSGDPHLKAAHIPENAKDRIPGIVPMQIPSPEVFEELIKFSFHTNVLEDNIGYLRFDMFGDGELLTQVSRLLVEHIWKKIMHTDAMIIDMRFNIGGPTSSIPILCSYFFDEGPPVLLDKIYSRPDDSVSELWTHAQVVGERYGSKKSMVILTSSVTAGTAEEFTYIMKRLGRALVIGEVTSGGCQPPQTYHVDDTNLYLTIPTARSVGASDGSSWEGVGVTPHVVVPAEEALARAKEMLQHNQLRVKRSPGLQDHL

SEQ ID NO: 11261 - protein, 201 aa, Homo Sapiens
MKWVWALLLLAALGSGRAERDCRVSSFRVKENFDKARFSGTWYAMAKKDPEGLFLQDNIVAEFSVDETGQMSATAKGRVRLLNNWDVCADMVGTFTDTEDPAKFKMKYWGVASFLQKGNDDHWIVDTDYDTYAVQYSCRLLNLDGTCADSYSFVFSRDPNGLPPEAQKIVRQRQEELCLARQYRLIVHNGYCDGRSERNLL

SEQ ID NO: 11262 - protein, 201 aa, Homo Sapiens; identical to SEQ ID NO: 11261

SEQ ID NO: 11263 - protein, 199 aa, Homo Sapiens
MNYSKIPAQVDLRRQTERDCRVSSFRVKENFDKARFSGTWYAMAKKDPEGLFLQDNIVAEFSVDETGQMSATAKGRVRLLNNWDVCADMVGTFTDTEDPAKFKMKYWGVASFLQKGNDDHWIVDTDYDTYAVQYSCRLLNLDGTCADSYSFVFSRDPNGLPPEAQKIVRQRQEELCLARQYRLIVHNGYCDGRSERNLL

SEQ ID NO: 11264 - protein, 199 aa, Homo Sapiens; identical to SEQ ID NO: 11263

SEQ ID NO: 11265 - protein, 28 aa, Homo Sapiens
EILENWNMFVGSQATNYGEDLTKNHDEL

SEQ ID NO: 11266 - protein, 331 aa, Homo Sapiens
MARGGRGRRLGLALGLLLALVLAPRVLRAKPTVRKERVVRPDSELGERPPEDNQSFQYDHEAFLGKEDSKTFDQLTPDESKERLGKIVDRIDNDGDGFVTTEELKTWIKRVQKRYIFDNVAKVWKDYDRDKDDKISWEEYKQATYGYYLGNPAEFHDSSDHHTFKKMLPRDERRFKAADLNGDLTATREEFTAFLHPEEFEHMKEIVVLETLEDIDKNGDGFVDQDEYIADMFSHEENGPEPDWVLSEREQFNEFRDLNKDGKLDKDEIRHWILPQDYDHAQAEARHLVYESDKNKDEKLTKEEILENWNMFVGSQATNYGEDLTKNHDEL

SEQ ID NO: 11267 - protein, 20 aa, Homo Sapiens
MLPRDERRFKAADLNGDLTA

SEQ ID NO: 11268 - protein, 57 aa, Homo Sapiens
  misc_feature (1)..(1): Xaa can be any naturally occurring amino acid
XETLEDIDKNGDGFVDQDEYIDKETSGSVTELSQKPGFIFWLLNSVLSTPPHGLHHE

SEQ ID NO: 11269 - protein, 335 aa, Homo Sapiens
MRLGPRTAALGLLLLCAAAAGAGKAEELHYPLGERRSDYDREALLGVQEDVDEYVKLGHEEQQKRLQAIIKKIDLDSDGFLTESELSSWIQMSFKHYAMQEAKQQFVEYDKNSDDTVTWDEYNIQMYDRVIDFDENTALDDAEEESFRKEFAICKKQSFCFWLLRFNLHLKDKKRFEKANQDSGPGLSLEEFIAFEHPEEVDYMTEFVIQEALEEHDKNGDGFVSLEEFLGDYRWDPTANEDPEWILVEKDRFVNDYDKDNDGRLDPQELLPWVVPNNQGIAQEEALHLIDEMDLNGDKKLSEEEILENPDLFLTSEATDYGRQLHDDYFYHDEL

SEQ ID NO: 11270 - protein, 317 aa, Homo Sapiens
MRLGPRTAALGLLLLCAAAAGAGKAEELHYPLGERRSDYDREALLGVQEDVDEYVKLGHEEQQKRLQAIIKKIDLDSDGFLTESELSSWIQMSFKHYAMQEAKQQFVEYDKNSDDTVTWDEYNIQMYDRVIDFDENTALDDAEEESFRKLHLKDKKRFEKANQDSGPGLSLEEFIAFEHPEEVDYMTEFVIQEALEEHDKNGDGFVSLEEFLGDYRWDPTANEDPEWILVEKDRFVNDYDKDNDGRLDPQELLPWVVPNNQGIAQEEALHLIDEMDLNGDKKLSEEEILENPDLFLTSEATDYGRQLHDDYFYHDEL

SEQ ID NO: 11271 - protein, 216 aa, Homo Sapiens
MRLGPRTAALGLLLLCAAAAGAGKAEELHYPLGERRSDYDREALLGVQLHLKDKKRFEKANQDSGPGLSLEEFIAFEHPEEVDYMTEFVIQEALEEHDKNGDGFVSLEEFLGDYRWDPTANEDPEWILVEKDRFVNDYDKDNDGRLDPQELLPWVVPNNQGIAQEEALHLIDEMDLNGDKKLSEEEILENPDLFLTSEATDYGRQLHDDYFYHDEL

SEQ ID NO: 11272 - protein, 155 aa, Homo Sapiens
  misc_feature (1)..(1): Xaa can be any naturally occurring amino acid
XGLLLLCAAAAGAGKAEELHYPLGERRSDYDREALLGVQEDVDEYVKLGHEEQQKRLQAIIKKIDLDSDGFLTESELSSWIQMSFKHYAMQEAKQQFVEYDKNSDDTVTWDEYNIQMYDRVIDFDENTALDDAEEESFRKHQCGGLGLHPQSQSA

SEQ ID NO: 11273 - protein, 169 aa, Homo Sapiens
FQYDHEAFLGREVAKEFDQLTPEESQARLGRIVDRMDRAGDGDGWVSLAELRAWIAHTQQRHIRDSVSAAWDTYDTDRDGRVGWEELRNATYGHYAPGEEFHDVEDAETYKKMLARDERRFRVADQDGDSMATREELTAFLHPEEFPHMRDIVIALFFSRIYLLTFLLL

SEQ ID NO: 11274 - protein, 150 aa, Homo Sapiens
MMWRPSVLLLLLLLRHGAQGKPSPDAGPHGQGRVHQAAPLSDAPHDDAHGNFQYDHEAFLGREVAKEFDQLTPEESQARLGRIVDRMDRAGDGDGWVSLAELRAWIAHTQQRHIRDSVKNFMTWRMQRPTKRCWLGTSGVSGWPTRMGTR

SEQ ID NO: 11275 - protein, 328 aa, Homo Sapiens
MMWRPSVLLLLLLLRHGAQGKPSPDAGPHGQGRVHQAAPLSDAPHDDAHGNFQYDHEAFLGREVAKEFDQLTPEESQARLGRIVDRMDRAGDGDGWVSLAELRAWIAHTQQRHIRDSVSAAWDTYDTDRDGRVGWEELRNATYGHYAPGEEFHDVEDAETYKKMLARDERRFRVADQDGDSMATREELTAFLHPEEFPHMRDIVIAETLEDLDRNKDGYVQVEEYIADLYSAEPGEEEPAWVQTERQQFRDFRDLNKDGHLDGSEVGHWVLPPAQDQPLVEANHLLHESDTDKDGRLSKAEILGNWNMFVGSQATNYGEDLTRHHDEL

SEQ ID NO: 11276 - protein, 58 aa, Homo Sapiens
  misc_feature (1)..(1): Xaa can be any naturally occurring amino acid
XTERQQFRDFRDLNKDGHLDGSEDGRLSKAEILGNWNMFVGSQATNYGEDLTRHHDEL

SEQ ID NO: 11277 - protein, 485 aa, Homo Sapiens
MPAMVEKGPEVSGKRRGRNNAAASASAAAASAAASAACASPAATAASGAAASSASAAAASAAAAPNNGQNKSLAAAAPNGNSSSNSWEEGSSGSSSDEEHGGGGMRVGPQYQAVVPDFDPAKLARRSQERDNLGMLVWSPNQNLSEAKLDEYIAIAKEKHGYNMEQALGMLFWHKHNIEKSLADLPNFTPFPDEWTVEDKVLFEQAFSFHGKTFHRIQQMLPDKSIASLVKFYYSWKKTRTKTSVMDRHARKQKREREESEDELEEANGNNPIDIEVDQNKESKKEVPPTETVPQVKKEKHSTQAKNRAKRKPPKGMFLSQEDVEAVSANATAATTVLRQLDMELVSVKRQIQNIKQTNSALKEKLDGGIEPYRLPEVIQKCNARWTTEEQLLAVQAIRKYGRDFQAISDVIGNKSVVQVKNFFVNYRRRFNIDEVLQEWEAEHGKEETNGPSNQKPVKSPDNSIKMPEEEDEAPVLDVRYASAS

SEQ ID NO: 11278 - protein, 35 aa, Homo Sapiens
QTNSALKEKLDGGIEPYRLPEPSGNMAEIFRQSQT

SEQ ID NO: 11279 - protein, 305 aa, Homo Sapiens
MVELMFPLLLLLLPFLLYMAAPQIRKMLSSGVCTSTVQLPGKVVVVTGANTGARVYLACRDVEKGELVAKEIQTTTGNQQVLVRKLDLSDTKSIRAFAKGFLAEEKHLHVLINNAGVMMCPYSKTADGFEMHIGVNHLGHFLLTHLLLEKLKESAPSRIVNVSSLAHHLGRIHFHNLQGEKFYNAGLAYCHSKLANILFTQELARRLKGSGVTTYSVHPGTVQSELVRHSSFMRWMWWLFSFFIKTPQQGAQTSLHCALTEGLEILSGNHFSDCHVAWVSAQARNETIARRLWDVSCDLLGLPID

SEQ ID NO: 11280 - protein, 187 aa, Homo Sapiens [sequence omitted]

SEQ ID NO: 11281 - protein, 318 aa, Homo Sapiens
MVELMFPLLLLLLPFLLYMAAPQIRKMLSSGVCTSTVQLPGKVVVVTGANTGIGKETAKELAQRGARVYLACRDVEKGELVAKEIQTTTGNQQVLVRKLDLSDTKSIRAFAKGFLAEEKHLHVLINNAGVMMCPYSKTADGFEMHIGVNHLGHFLLTHLLLEKLKESAPSRIVNVSSLAHHLGRIHFHNLQGEKFYNAGLAYCHSKLANILFTQELARRLKGSGVTTYSVHPGTVQSELVRHSSFMRWMWWLFSFFIKTPQQGAQTSLHCALTEGLEILSGNHFSDCHVAWVSAQARNETIARRLWDVSCDLLGLPID

SEQ ID NO: 11282 - protein, 248 aa, Homo Sapiens
MVELMFPLLLLLLPFLLYMAAPQIRKMLSSGVCTSTVQLPGKVVVVTGANTGIGKETAKELAQRGARVYLACRDVEKGELVAKEIQTTTGNQQVLVRKLDLSDTKSIRAFAKGFLAEEKHLHVLINNAGVMMCPYSKTADGFEMHIGVNHLGSGVTTYSVHPGTVQSELVRHSSFMRWMWWLFSFFIKTPQQGAQTSLHCALTEGLEILSGNHFSDCHVAWVSAQARNETIARRLWDVSCDLLGLPID

SEQ ID NO: 11283 - protein, 178 aa, Homo Sapiens
MVELMFPLLLLLLPFLLYMAAPQIRKMLSSGVCTSTVQLPGKVVVVTGANTGIGKETAKELAQRGHFLLTHLLLEKLKESAPSRIVNVSSLAHHLGRIHFHNLQGEKFYNAGLAYCHSKLANILFTQELARRLKGSGVTTYSVHPGTVQSELVRHSSFMRWMWWLFSFFIKTPQQGAQ

SEQ ID NO: 11284 - protein, 61 aa, Homo Sapiens
MVELMFPLLLLLLPFLLYMAAPQIRSLPPNPSAARETKGISPIKDSKCVFPRTSPGKDPLP

SEQ ID NO: 11285 - protein, 62 aa, Homo Sapiens
MVELMFPLLLLLLPFLLYMAAPQIRSSSIFSLPGCGKGGIGGQRDPDHDREPAGVGAETGPV

SEQ ID NO: 11286 - protein, 204 aa, Homo Sapiens
SDTKSIRAFAKGFLAEEKHLHVLINNAGVMMCPYSKTADGFEMHIGVNHLGHFLLTHLLLEKLKESAPSRIVNVSSLAHHLGRIHFHNLQGEKFYNAGLAYCHSKLANILFTQELARRLKVQSELVRHSSFMRWMWWLFSFFIKTPQQGAQTSLHCALTEGLEILSGNHFSDCHVAWVSAQARNETIARRLWDVSCDLLGLPID

SEQ ID NO: 11287 - protein, 316 aa, Homo Sapiens
MLVTLGLLTSFFSFLYMVAPSIRKFFAGGVCRTNVQLPGKVVVITGANTGIGKETARELASRGARVYIACRDVLKGESAASEIRVDTKNSQVLVRKLDLSDTKSIRAFAEGFLAEEKQLHILINNAGVMMCPYSKTADGFETHLGVNHLGHFLLTYLLLERLKVSAPARVVNVSSVAHHIGKIPFHDLQSEKRYSRGFAYCHSKLANVLFTRELAKRLQGTGVTTYAVHPGVVRSELVRHSSLLCLLWRLFSPFVKTAREGAQTSLHCALAEGLEPLSGKYFSDCKRTWVSPRARNNKTAERLWNVSCELLGIRWE

SEQ ID NO: 11288 - protein, 316 aa, Homo Sapiens; identical to SEQ ID NO: 11287

SEQ ID NO: 11289 - protein, 42 aa, Homo Sapiens
MEKCEAAAKDIRGETLNHHVNARHLDLASLKSIREFAAKIIE

SEQ ID NO: 11290 - protein, 260 aa, Homo Sapiens
MEKCEAAAKDIRGETLNHHVNARHLDLASLKSIREFAAKIIEEEERVDILINNAGVMRCPHWTTEDGFEMQFGVNHLGHFLLTNLLLDKLKASAPSRIINLSSLAHVAGHIDFDDLNWQTRKYNTKAAYCQSKLAIVLFTKELSRRLQGSGVTVNALHPGVARTELGRHTGIHGSTFSSTTLGPIFWLLVKSPELAAQPSTYLAVAEELADVSGKYFDGLKQKAPAPEAEDEEVARRLWAESARLVGLEAPSVREQPLPR

SEQ ID NO: 11291 - protein, 260 aa, Homo Sapiens; identical to SEQ ID NO: 11290

SEQ ID NO: 11292 - protein, 29 aa, Homo Sapiens
MSRYLLPLSALGTVAGAAVLLKDYVTGGA

SEQ ID NO: 11293 - protein, 220 aa, Homo Sapiens
MSRYLLPLSALGTVAGAAVLLKDYVTGGACPSKATIPGKTVIVTGANTGIGKQTALELARRGGNIILACRDMEKCEAAAKDIRGETLNHHVNARHLDLASLKSIREFAAKIIEEEERVDILINNAGVMRCPHWTTEDGFEMQFGVNHLGHFLLTNLLLDKLKASAPSRIINLSSLAHVAGHIDFDDLNWQTRKYNTKAAYCQSKLAIVLFTKELSRRLQG

SEQ ID NO: 11294 - protein, 220 aa, Homo Sapiens; identical to SEQ ID NO: 11293

SEQ ID NO: 11295 - protein, 331 aa, Homo Sapiens
MSRYLLPLSALGTVAGAAVLLKDYVTGGACPSKATIPGKTVIVTGANTGIGKQTALELARRGGNIILACRDMEKCEAAAKDIRGETLNHHVNARHLDLASLKSIREFAAKIIEEEERVDILINNAGVMRCPHWTTEDGFEMQFGVNHLGHFLLTNLLLDKLKASAPSRIINLSSLAHVAGHIDFDDLNWQTRKYNTKAAYCQSKLAIVLFTKELSRRLQGSGVTVNALHPGVARTELGRHTGIHGSTFSSTTLGPIFWLLVKSPELAAQPSTYLAVAEELADVSGKYFDGLKQKAPAPEAEDEEVARRLWAESARLVGLEAPSVREQPLPR

SEQ ID NO: 11296 - protein, 35 aa, Homo Sapiens
MSRYLLPLSALGTVAGAAVLLKRQHHPGLPRHGEV

SEQ ID NO: 11297 - protein, 35 aa, Homo Sapiens; identical to SEQ ID NO: 11296

SEQ ID NO: 11298 - protein, 55 aa, Homo Sapiens
MHVKEAGLFGLVNNAGVAGIIGPTPWLTRDDFQRVLNVNTMGPIGVTLALLPLLQ

SEQ ID NO: 11299 - protein, 221 aa, Homo Sapiens
MHVKEAGLFGLVNNAGVAGIIGPTPWLTRDDFQRVLNVNTMGPIGVTLALLPLLQQARGRVINITSVLGRLAANGGGYCVSKFGLEAFSDSLRRDVAHFGIRVSIVEPGFFRTPVTNLESLEKTLQACWARLPPATQAHYGGAFLTKYLKMQQRIMNLICDPDLTKVSRCLEHALTARHPRTRYSPGWDAKLLWLPASYLPASLVDAVLTWVLPKPAQAVY

SEQ ID NO: 11300 - protein, 318 aa, Homo Sapiens
MWLPLLLGALLWAVLWLLRDRQSLPASNAFVFITGCDSGFGRLLALQLDQRGFRVLASCLTPSGAEDLQRVASSRLHTTLLDITDPQSVQQAAKWVEMHVKEAGLFGLVNNAGVAGIIGPTPWLTRDDFQRVLNVNTMGPIGVTLALLPLLQQARGRVINITSVLGRLAANGGGYCVSKFGLEAFSDSLRRDVAHFGIRVSIVEPGFFRTPVTNLESLEKTLQACWARLPPATQAHYGGAFLTKYLKMQQRIMNLICDPDLTKVSRCLEHALTARHPRTRYSPGWDAKLLWLPASYLPASLVDAVLTWVLPKPAQAVY

SEQ ID NO: 11301 - protein, 318 aa, Homo Sapiens; identical to SEQ ID NO: 11300

SEQ ID NO: 11302 - protein, 103 aa, Homo Sapiens
  misc_feature (1)..(1): Xaa can be any naturally occurring amino acid
XLLLGALLWAVLWLLRDRQSLPASNAFVFITGCDSGFGRLLALQLDQRGFRVLASCLTPSGAEDLQRVASSRLHTTLLDITDPQSVQQAAKWVEMHVKEAGGM

SEQ ID NO: 11303 - protein, 331 aa, Homo Sapiens
MNGQSQVLPGGGHESREGINMAAAPRTVLISGCSSGIGLELAVQLAHDPKKRYQVVATMRDLGKKETLEAAAGEALGQTLTVAQLDVCSDESVAQCLSCIQGEVDVLVNNAGMGLVGPLEGLSLAAMQNVFDTNFFGAVRLVKAVLPGMKRRRQGHIVVISSVMGLQGVIFNDVYAASKFALEGFFESLAIQLLQFNIFISLVEPGPVVTEFEGKLLAQVSMAEFPGTDPETLHYFRDLYLPASRKLFCSVGQNPQDVVQAIVNVISSTRPPLRRQTNIRYSPLTTLKTVDSSGSLYVRTTHRLLFRCPRLLNLGLQCLSCGCLPTRVRPR

SEQ ID NO: 11304 - protein, 79 aa, Homo Sapiens
  misc_feature (1)..(1): Xaa can be any naturally occurring amino acid
XFESLAIQLLQFNILFLWLSSQALTLRPCTTSGTSISQPPGSCFAPWDRTHRTWFRPLSTSSARLDHPCADRPTSATRR

SEQ ID NO: 11305 - protein, 166 aa, Homo Sapiens
MAQTSSYFMLISCLMFLSQSQGQEAQTELPQARISCPEGTNAYRSYCYYFNEDRETWVDADLYCQNMNSGNLVSVLTQAEGAFVASLIKESGTDDFNVWIGLHDPKKNRRWHWSSGSLVSYKSWGIGAPSSVNPGYCVSLTSSTGFQKWKDVPCEDKFSFVCKFKN

SEQ ID NO: 11306 - protein, 149 aa, Homo Sapiens
FNEDPETWVDADLYCQNMNSGNLVSVLTQAEGAFVASLIKESSTDDSNVWIGLHDPKKNRRWHWSSGSLVSYKSWDTGSPSSANAGYCASLTSCSGERQTIYPPVAISFPLISGDEHGDWDRGKDSRNGRMNLVRRSSPLFASSKTRGS

SEQ ID NO: 11307 - protein, 166 aa, Homo Sapiens
MAQTNSFFMLISSLMFLSLSQGQESQTELPNPRISCPEGTNAYRSYCYYFNEDPETWVDADLYCQNMNSGNLVSVLTQAEGAFVASLIKESSTDDSNVWIGLHDPKKNRRWHWSSGSLVSYKSWDTGSPSSANAGYCASLTSCSGFKKWKDESCEKKFSFVCKFKN

SEQ ID NO: 11308 - protein, 175 aa, Homo Sapiens
MLPPMALPSVSWMLLSCLMLLSQVQGEEPQRELPSARIRCPKGSKAYGSHCYALFLSPKSWTDADLACQKRPSGNLVSVLSGAEGSFVSSLVKSIGNSYSYVWIGLHDPTQGTEPNGEGWEWSSSDVMNYFAWERNPSTISSPGHCASLSRSTAFLRWKDYNCNVRLPYVCKFTD

SEQ ID NO: 11309 - protein, 175 aa, Homo Sapiens; identical to SEQ ID NO: 11308

SEQ ID NO: 11310 - protein, 175 aa, Homo Sapiens; identical to SEQ ID NO: 11308

SEQ ID NO: 11311 - protein, 129 aa, Homo Sapiens
MLPPMALPSVSWMLLSCLILLCQVQGEETQKELPSPRISCPKGSKAYGSPCYALFLSPKSWMDADGSEPDGDGWEWSSTDVMNYFAWEKNPSTILNPGHCGSLSRSTGFLKWKDYNCDAKLPYVCKFKD

SEQ ID NO: 11312 - protein, 175 aa, Homo Sapiens
MLPPMALPSVSWMLLSCLILLCQVQGEETQKELPSPRISCPKGSKAYGSPCYALFLSPKSWMDADLACQKRPSGKLVSVLSGAEGSFVSSLVRSISNSYSYIWIGLHDPTQGSEPDGDGWEWSSTDVMNYFAWEKNPSTILNPGHCGSLSRSTGFLKWKDYNCDAKLPYVCKFKD

SEQ ID NO: 11313 - protein, 175 aa, Homo Sapiens; identical to SEQ ID NO: 11312

SEQ ID NO: 11314 - protein, 158 aa, Homo Sapiens
MASRSMRLLLLLSCLAKTGVLGDIIMRPSCAPGWFYHKSNCYGYFRKLRNWSDAELECQSYGNGAHLASILSLKEASTIAEYISGYQRSQPIWIGLHDPQKRQQWQWIDGAMYLYRSWSGKSMGGNKHCAEMSSNNNFLTWSSNECNKRQHFLCKYRP

SEQ ID NO: 11315 - protein, 158 aa, Homo Sapiens; identical to SEQ ID NO: 11314

SEQ ID NO: 11316 - protein, 103 aa, Homo Sapiens
MASRSMRLLLLLSCLAKTGVLGDIIMRPSCAPGWFYHKSNCYGYFRKLRNWSDAELECQSYGNGAHLASILSLKEASTIAEYISGYQRSQPIWIGLHDPQKTF

SEQ ID NO: 11317 - protein, 134 aa, Homo Sapiens
MASRSMRLLLLLSCLAKTGVLGDIIMRPSCAPGWFYHKSNCYGYFRKLRNWSDAEVRNLLPAWPGLSRAKDQPEPQISFDSGSSVLPGHYEEKPLWLVKWREEGCVFNSFNSVSIAEAGAVCQTLDGLQAHTDT

SEQ ID NO: 11318 - protein, 3458 aa, Homo Sapiens
MERSGWARQTFLLALLLGATLRARAAAGYYPRFSPFFFLCTHHGELEGDGEQGEVLISLHIAGNPTYYVPGQEYHVTISTSTFFDGLLVTGLYTSTSVQASQSIGGSSAFGFGIMSDHQFGNQFMCSVVASHVSHLPTTNLSFIWIAPPAGTGCVNFMATATHRGQVIFKDALAQQLCEQGAPTDVTVHPHLAEIHSDSIILRDDFDSYHQLQLNPNIWVECNNCETGEQCGAIMHGNAVTFCEPYGPRELITTGLNTTTASVLQFSIGSGSCRFSYSDPSIIVLYAKNNSADWIQLEKIRAPSNVSTIIHILYLPEDAKGENVQFQWKQENLRVGEVYEACWALDNILIINSAHRQVVLEDSLDPVDTGNWLFFPGATVKHSCQSDGNSIYFHGNEGSEFNFATTRDVDLSTEDIQEQWSEEFESQPTGWDVLGAVIGTECGTIESGLSMVFLKDGERKLCTPSMDTTGYGNLRFYFVMGGICDPGNSHENDIILYAKIEGRKEHITLDTLSYSSYKVPSLVSVVINPELQTPATKFCLRQKNHQGHNRNVWAVDFFHVLPVLPSTMSHMIQFSINLGCGTHQPGNSVSLEFSTNHGRSWSLLHTECLPEICAGPHLPHSTVYSSENYSGWNRITIPLPNAALTRNTRIRWRQTGPILGNMWAIDNVYIGPSCLKFCSGRGQCTRHGCKCDPGFSGPACEMASQTFPMFISESFGSSRLSSYHNFYSIRGAEVSFGCGVLASGKALVFNKDGRRQLITSFLDSSQSRFLQFTLRLGSKSVLSTCRAPDQPGEGVLLHYSYDNGITWKLLEHYSYLSYHEPRIISVELPGDAKQFGIQFRWWQPYHSSQREDVWAIDEIIMTSVLFNSISLDFTNLVEVTQSLGFYLGNVQPYCGHDWTLCFTGDSKLASSMRYVETQSMQIGASYMIQFSLVMGCGQKYTPHMDNQVKLEYSTNHGLTWHLVQEECLPSMPSCQEFTSASIYHASEFTQWRRVIVLLPQKTWSSATRFRWSQSYYTAQDEWALDSIYIGQQCPNMCSGHGSCDHGICRCDQGYQGTECHPEAALPSTIMSDFENQNGWESDWQEVIGGEIVKPEQGCGVISSGSSLYFSKAGKRQLVSWDLDTSWVDFVQFYIQIGGESASCNKPDSREEGVLLQYSNNGGIQWHLLAEMYFSDFSKPRFVYLELPAAAKTPCTRFRWWQPVFSGEDYDQWAVDDIIILSEKQKQIIPVINPTLPQNFYEKPAFDYPMNQMSVWLMLANEGMVKNETFCAATPSAMIFGKSDGDRFAVTRDLTLKPGYVLQFKLNIGCANQFSSTAPVLLQYSHDAGMSWFLVKEGCYPASAGKGCEGNSRELSEPTMYHTGDFEEWTRITIVIPRSLASSKTRFRWIQESSSQKNVPPFGLDGVYISEPCPSYCSGHGDCISGVCFCDLGYTAAQGTCVSNVPNHNEMFDRFEGKLSPLWYKITGAQVGTGCGTLNDGKSLYFNGPGKREARTVPLDTRNIRLVQFYIQIGSKTSGITCIKPRTRNEGLIVQYSNDNGILWHLLRELDFMSFLEPQIISIDLPQDAKTPATAFRWWQPQHGKHSAQWALDDVLIGMNDSSQTGFQDKFDGSIDLQANWYRIQGGQVDIDCLSMDTALIFTENIGKPRYAETWDFHVSASTFLQFEMSMGCSKPFSNSHSVQLQYSLNNGKDWHLVTEECVPPTIGCLHYTESSIYTSERFQNWKRITVYLPLSTISPRTRFRWIQANYTVGADSWAIDNVVLASGCPWMCSGRGICDAGRCVCDRGFGGPYCVPVVPLPSILKDDFNGNLHPDLWPEVYGAERGNLNGETIKSGTSLIFKGEGLRMLISRDLDCTNTMYVQFSLRFIAKSTPERSHSILLQFSISGGITWHLMDEFYFPQTTNILFINVPLPYTAQTNATRFRLWQPYNNGKKEEIWIVDDFIIDGNNVNNPVMLLDTFDFGPREDNWFFYPGGNIGLYCPYSSKGAPEEDSAMVFVSNEVGEHSITTRDLNVNENTIIQFEINVGCSTDSSSADPVRLEFSRDFGATWHLLLPLCYHSSSHVSSLCSTEHHPSSTYYAGTMQGWRREVVHFGKLHLCGSVRFRWYQGFYPAGSQPVTWAIDNVYIGPQCEEMCNGQGSCINGTKCICDPGYSGPTCKISTKNPDFLKDDFEGQLESDRFLLMSGGKPSRKCGILSSGNNLFFNEDGLRMLMTRDLDLSHARFVQFFMRLGCGKGVPDPRSQPVLLQYSLNGGLSWSLLQEFLFSNSSNVGRYIALEIPLKARSGSTRLRWWQPSENGHFYSPWVIDQILIGGNISGNTVLEDDFTTLDSRKWLLHPGGTKMPVCGSTGDALVFIEKASTRYVVSTDVAVNEDSFLQIDFAASCSVTDSCYAIELEYSVDLGLSWHPLVRDCLPTNVECSRYHLQRILVSDTFNKWTRITLPLPPYTRSQATRFRWHQPAPFDKQQTWAIDNVYIGDGCIDMCSGHGRCIQGNCVCDEQWGGLYCDDPETSLPTQLKDNFNRAPSSQNWLTVNGGKLSTVCGAVASGMALHFSGGCSRLLVTVDLNLTNAEFIQFYFMYGCLITPNNRNQGVLLEYSVNGGITWNLLMEIFYDQYSKPGFVNILLPPDAKEIATRFRWWQPRHDGLDQNDWAIDNVLISGSADQRTVMLDTFSSAPVPQHERSPADAGPVGRIAFDMFMEDKTSVNEHWLFHDDCTVERFCDSPDGVMLCGSHDGREVYAVTHDLTPTEGWIMQFKISVGCKVSEKIAQNQIHVQYSTDFGVSWNYLVPQCLPADPKCSGSVSQPSVFFPTKGWKRITYPLPESLVGNPVRFRFYQKYSDMQWAIDNFYLGPGCLDNCRGHGDCLREQCICDPGYSGPNCYLTHTLKTFLKERFDSEEIKPDLWMSLEGGSTCTECGILAEDTALYFGGSTVRQAVTQDLDLRGAKFLQYWGRIGSENNMTSCHRPICRKEGVLLDYSTDGGITWTLLHEMDYQKYISVRHDYILLPEDALTNTTRLRWWQPFVISNGIVVSGVERAQWALDNILIGGAEINPSQLVDTFDDEGTSHEENWSFYPNAVRTAGFCGNPSFHLYWPNKKKDKTHNALSSRELIIQPGYMMQFKIVVGCEATSCGDLHSVMLEYTKDARSDSWQLVQTQCLPSSSNSIGCSPFQFHEATIYNSVNSSSWKRITIQLPDHVSSSATQFRWIQKGEETEKQSWAIDHVYIGEACPKLCSGHGYCTTGAICICDESFQGDDCSVFSHDLPSYIKDNFESARVTEANWETIQGGVIGSGCGQLAPYAHGDSLYFNGCQIRQAATKPLDLTRASKIMFVLQIGSMSQTDSCNSDLSGPHAVDKAVLLQYSVNNGITWHVIAQHQPKDFTQAQRVSYNVPLEARMKGVLLRWWQPRHNGTGHDQWALDHVEVVLTRKQNYMMNFSRQHGLRHFYNRRRRSLRRYP

SEQ ID NO: 11319 - protein, 3460 aa, Homo Sapiens [sequence omitted]

SEQ ID NO: 11320 - protein, 3460 aa, Homo Sapiens
MERSGWARQTFLLALLLGATLRARAAAGYYPRFSPFFFLCTHHGELEGDGEQGEVLISLHIAGNPTYYVPGQEYHVTISTSTFFDGLLVTGLYTSTSVQASQSIGGSSAFGFGIMSDHQFGNQFMCSVVASHVSHLPTTNLSFIWIAPPAGTGCVNFMATATHRGQVIFKDALAQQLCEQGAPTDVTVHPHLAEIHSDSIILRDDFDSYHQLQLNPNIWVECNNCETGEQCGAIMHGNAVTFCEPYGPRELITTGLNTTTASVLQFSIGSGSCRFSYSDPSIIVLYAKNNSADWIQLEKIRAPSNVSTIIHILYLPEDAKGENVQFQWKQENLRVGEVYEACWALDNILIINSAHRQVVLEDSLDPVDTGNWLFFPGATVKHSCQSDGNSIYFHGNEGSEFNFATTRDVDLSTEDIQEQWSEEFESQPTGWDVLGAVIGTECGTIESGLSMVFLKDGERKLCTPSMDTTGYGNLRFYFVMGGICDPGNSHENDIILYAKIEGRKEHITLDTLSYSSYKVPSLVSVVINPELQTPATKFCLRQKNHQGHNRNVWAVDFFHVLPVLPSTMSHMIQFSINLGCGTHQPGNSVSLEFSTNHGRSWSLLHTECLPEICAGPHLPHSTVYSSENYSGWNRITIPLPNAALTRNTRIRWRQTGPILGNMWAIDNVYIGPSCLKFCSGRGQCTRHGCKCDPGFSGPACEMASQTFPMFISESFGSSRLSSYHNFYSIRGAEVSFGCGVLASGKALVFNKDGRRQLITSFLDSSQSRFLQFTLRLGSKSVLSTCRAPDQPGEGVLLHYSYDNGITWKLLEHYSYLSYHEPRIISVELPGDAKQFGIQFRWWQPYHSSQREDVWAIDEIIMTSVLFNSISLDFTNLVEVTQSLGFYLGNVQPYCGHDWTLCFTGDSKLASSMRYVETQSMQIGASYMIQFSLVMGCGQKYTPHMDNQVKLEYSTNHGLTWHLVQEECLPSMPSCQEFTSASIYHASEFTQWRRVIVLLPQKTWSSATRFRWSQSYYTAQDEWALDSIYIGQQCPNMCSGHGSCDHGICRCDQGYQGTECHPEAALPSTIMSDFENQNGWESDWQEVIGGEIVKPEQGCGVISSGSSLYFSKAGKRQLVSWDLDTSWVDFVQFYIQIGGESASCNKPDSREEGVLLQYSNNGGIQWHLLAEMYFSDFSKPRFVYLELPAAAKTPCTRFRWWQPVFSGEDYDQWAVDDIIILSEKQKQIIPVINPTLPQNFYEKPAFDYPMNQMSVWLMLANEGMVKNETFCAATPSAMIFGKSDGDRFAVTRDLTLKPGYVLQFKLNIGCANQFSSTAPVLLQYSHDAGMSWFLVKEGCYPASAGKGCEGNSRELSEPTMYHTGDFEEWTRITIVIPRSLASSKTRFRWIQESSSQKNVPPFGLDGVYISEPCPSYCSGHGDCISGVCFCDLGYTAAQGTCVSNVPNHNEMFDRFEGKLSPLWYKITGAQVGTGCGTLNDGKSLYFNGPGKREARTVPLDTRNIRLVQFYIQIGSKTSGITCIKPRTRNEGLIVQYSNDNGILWHLLRELDFMSFLEPQIISIDLPQDAKTPATAFRWWQPQHGKHSAQWALDDVLIGMNDSSQTGFQDKFDGSIDLQANWYRIQGGQVDIDCLSMDTALIFTENIGKPRYAETWDFHVSASTFLQFEMSMGCSKPFSNSHSVQLQYSLNNGKDWHLVTEECVPPTIGCLHYTESSIYTSERFQNWKRITVYLPLSTISPRTRFRWIQANYTVGADSWAIDNVVLASGCPWMCSGRGICDAGRCVCDRGFGGPYCVPVVPLPSILKDDFNGNLHPDLWPEVYGAERGNLNGETIKSGTSLIFKGEGLRMLISRDLDCTNTMYVQFSLRFIAKSTPERSHSILLQFSISGGITWHLMDEFYFPQTTNILFINVPLPYTAQTNATRFRLWQPYNNGKKEEIWIVDDFIIDGNNVNNPVMLLDTFDFGPREDNWFFYPGGNIGLYCPYSSKGAPEEDSAMVFVSNEVGEHSITTRDLNVNENTIIQFEINVGCSTDSSSADPVRLEFSRDFGATWHLLLPLCYHSSSHVSSLCSTEHHPSSTYYAGTMQGWRREVVHFGKLHLCGSVRFRWYQGFYPAGSQPVTWAIDNVYIGPQCEEMCNGQGSCINGTKCICDPGYSGPTCKISTKNPDFLKDDFEGQLESDRFLLMSGGKPSRKCGILSSGNNLFFNEDGLRMLMTRDLDLSHARFVQFFMRLGCGKGVPDPRSQPVLLQYSLNGGLSWSLLQEFLFSNSSNVGRYIALEIPLKARSGSTRLRWWQPSENGHFYSPWVIDQILIGGNISGNTVLEDDFTTLDSRKWLLHPGGTKMPVCGSTGDALVFIEKASTRYVVSTDVAVNEDSFLQIDFAASCSVTDSCYAIELEYSVDLGLSWHPLVRDCLPTNVECSRYHLQRILVSDTFNKWTRITLPLPPYTRSQATRFRWHQPAPFDKQQTWAIDNVYIGDGCIDMCSGHGRCIQGNCVCDEQWGGLYCDDPETSLPTQLKDNFNRAPSSQNWLTVNGGKLSTVCGAVASGMALHFSGGCSRLLVTVDLNLTNAEFIQFYFMYGCLITPNNRNQGVLLEYSVNGGITWNLLMEIFYDQYSKPGFVNILLPPDAKEIATRFRWWQPRHDGLDQNDWAIDNVLISGSADQRTVMLDTFSSAPVPQHERSPADAGPVGRIAFDMFMEDKTSVNEHWLFHDDCTVERFCDSPDGVMLCGSHDGREVYAVTHDLTPTEGWIMQFKISVGCKVSEKIAQNQIHVQYSTDFGVSWNYLVPQCLPADPKCSGSVSQPSVFFPTKGWKRITYPLPESLVGNPVRFRFYQKYSDMQWAIDNFYLGPGCLDNCRGHGDCLREQCICDPGYSGPNCYLTHTLKTFLKERFDSEEIKPDLWMSLEGGSTCTECGILAEDTALYFGGSTVRQAVTQDLDLRGAKFLQYWGRIGSENNMTSCHRPICRKEGVLLDYSTDGGITWTLLHEMDYQKYISVRHDYILLPEDALTNTTRLRWWQPFVISNGIVVSGVERAQWALDNILIGGAEINPSQLVDTFDDEGTSHEENWSFYPNAVRTAGFCGNPSFHLYWPNKKKDKTHNALSSRELIIQPGYMMQFKIVVGCEATSCGDLHSVMLEYTKDARSDSWQLVQTQCLPSSSNSIGCSPFQFHEATIYNSVNSSSWKRITIQLPDHVSSSATQFRWIQKGEETEKQSWAIDHVYIGEACPKLCSGHGYCTTGAICICDESFQGDDCSVFSHDLPSYIKDNFESARVTEANWETIQGGVIGSGCGQLAPYAHGDSLYFNGCQIRQAATKPLDLTRASKIMFVLQIGSMSQTDSCNSDLSGPHAVDKAVLLQYSVNNGITWHVIAQHQPKDFTQAQRVSYNVPLEARMKGVLLRWWQPRHNGTGHDQWALDHVEVVLVSTRKQNYMMNFSRQHGLRHFYNRRRRSLRRYP

SEQ ID NO: 11321 - protein, 68 aa, Homo Sapiens
  misc_feature (1)..(1): Xaa can be any naturally occurring amino acid
XLRWWQPRHNGTGHDQWALDHVEVVLDEKSYIASKPDQTFMTNHSAACIERHFLTCVIFHYLLSLVFH

SEQ ID NO: 11322 - protein, 103 aa, Homo Sapiens
MKPSLLCRPLSCFLMLLPWPLATLTSTTLWQCPPGEEPDLDPGQGTLCRPCPPGTFSAAWGSSPCQPHARCSLWRRLEAQVGMATRDTLCGDCWPGNQPCLPD

SEQ ID NO: 11323 - protein, 101 aa, Homo Sapiens
MKPSLLCRPLSCFLMLLPWPLATLTSTTLWQCPPGEEPDLDPGQGTLCRPCPPGTFSAAWGSSPCQPHARCSLWRRLEAQVGMATRDTLCGDCWPGWFGPW

SEQ ID NO: 11324 - protein, 430 aa, Homo Sapiens
MKPSLLCRPLSCFLMLLPWPLATLTSTTLWQCPPGEEPDLDPGQGTLCRPCPPGTFSAAWGSSPCQPHARCSLWRRLEAQVGMATRDTLCGDCWPGWFGPWGVPRVPCQPCSWAPLGTHGCDEWGRRARRGVEVAAGASSGGETRQPGNGTRAGGPEETAAQYAVIAIVPVFCLMGLLGILVCNLLKRKGYHCTAHKEVGPGPGGGGSGINPAYRTEDANEDTIGVLVRLITEKKENAAALEELLKEYHSKQLVQTSHRPVSKLPPAPPNVPHICPHRHHLHTVQGLASLSGPCCSRCSQKKWPEVLLSPEAVAATTPVPSLLPNPTRVPKAGAKAGRQGEITILSVGRFRVARIPEQRTSSMVSEVKTITEAGPSWGDLPDSPQPGLPPEQQALLGSGGSRTKWLKPPAENKAEENRYVVRLSESNLVI

SEQ ID NO: 11325 - protein, 430 aa, Homo Sapiens; identical to SEQ ID NO: 11324

SEQ ID NO: 11326 - protein, 406 aa, Homo Sapiens
MDGWRRMPRWGLLLLLWGSCTFGLPTDTTTFKRIFLKRMPSIRESLKERGVDMARLGPEWSQPMKRLTLGNTTSSVILTNYMDTQYYGEIGIGTPPQTFKVVFDTGSSNVWVPSSKCSRLYTACVYHKLFDASDSSSYKHNGTELTLRYSTGTVSGFLSQDIITVGGITVTQMFGEVTEMPALPFMLAEFDGVVGMGFIEQAIGRVTPIFDNIISQGVLKEDVFSFYYNRDSENSQSLGGQIVLGGSDPQHYEGNFHYINLIKTGVWQIQMKGVSVGSSTLLCEDGCLALVDTGASYISGSTSSIEKLMEALGAKKRLFDYVVKCNEGPTLPDISFHLGGKEYTLTSADYVFQESYSSKKLCTLAIHAMDIPPPTGPTWALGATFIRKFYTEFDRRNNRIGFALAR

SEQ ID NO: 11327 - protein, 368 aa, Homo Sapiens
MPSIRESLKERGVDMARLGPEWSQPMKRLTLGNTTSSVILTNYMDTQYYGEIGIGTPPQTFKVVFDTGSSNVWVPSSKCSRLYTACVYHKLFDASDSSSYKHNGTELTLRYSTGTVSGFLSQDIITVGGITVTQMFGEVTEMPALPFMLAEFDGVVGMGFIEQAIGRVTPIFDNIISQGVLKEDVFSFYYNRDSENSQSLGGQIVLGGSDPQHYEGNFHYINLIKTGVWQIQMKGVSVGSSTLLCEDGCLALVDTGASYISGSTSSIEKLMEALGAKKRLFDYVVKCNEGPTLPDISFHLGGKEYTLTSADYVFQESYSSKKLCTLAIHAMDIPPPTGPTWALGATFIRKFYTEFDRRNNRIGFALAR

SEQ ID NO: 11328 - protein, 394 aa, Homo Sapiens
MDGRRVPAQPAAEFSLTPGGYRSVGRSRRCSRGSIPRNIPKRSWKKPHPQLCSLQAEEEPMLERRCRGPLAMGLAQPRLLSGPSQESPQTLGKESRGLRQQGTSVAQSGAQAPGRAHRCAHCRRHFPGWVALWLHTRRCQARLPLPCPECGRRFRHAPFLALHRQVHAAATPDLGFACHLCGQSFRGWVALVLHLRAHSAAKRPIACPKCERRFWRRKQLRAHLRRCHPPAPEARPFICGNCGRSFAQWDQLVAHKRVHVAEALEEAAAKALGPRPRGRPAVTAPRPGGDAVDRPFQCACCGKRFRHKPNLIAHRRVHTGERPHQCPECGKRFTNKPYLTSHRRIHTGEKPYPCKECGRRFRHKPNLLSHSKIHKRSEGSAQAAPGPGSPQLPA

SEQ ID NO: 11329 - protein, 366 aa, Homo Sapiens
MDGRRVPAQPAAEFSLTPGGYRSVGRSRRCSRGSIPRNIPKRSWKKPHPQLCSLQEEEPMLERRCRGPLAMGLAQPRLLSGPSQESPQTLGKESRGLRQQGTSVAQSGAQAPGRAHRCAHCRRHFPGWVALWLHTRRCQARLPLPCPECGRRFRHAPFLALHRQVHAAATPDLGFACHLCGQSFRGWVALVLHLRAHSAAKRPIACPKCERRFWRRKQLRAHLRRCHPPAPEARPFICGNCGRSFAQWDQLVAHKRVHVAEALEEAAAKALGPRPRGRPAVTAPRPGGDAVDRPFQCACCGKRFRHKPNLIAHRRVHTGERPHQCPECGKRFTNKPYLTSHRRIHTGEKPYPCKECGRRFRHKPNL

SEQ ID NO: 11330 - protein, 55 aa, Homo Sapiens
MDGRRVPAQPAAEQRKNRCWNVVAGAPWPWAWPSPDSFLGPPRSHPRPWGRSPAG

SEQ ID NO: 11331 - protein, 47 aa, Homo Sapiens
MDGRRVPAQPAAEVRPGQGRGATAGPRGAAPPAGRVTVRLASLQSEV

SEQ ID NO: 11332 - protein, 47 aa, Homo Sapiens; identical to SEQ ID NO: 11331

SEQ ID NO: 11333 - protein, 136 aa, Homo Sapiens
MDGRRVPAQPAAEVRPGQGRGATAGPRGAAPPAGRVTVSVRDRVRGRTDAGTSLQGPPGHGPGPAPTPFWALPGVTPDPGEGVPRAEATRHVSGPVWCPSPRQGPSLCPLSKALPWLGGSVASHPPVPGPAALALP

SEQ ID NO: 11334 - protein, 624 aa, Homo Sapiens
MGIGVSLLLQFSLTPGGYRSVGRSRRCSRGSIPRNIPKRSWKKPHPQLCSLQAEEEPMLERRCRGPLAMGLAQPRLLSGPSQESPQTLGKESRGLRQQGTSVAQSGAQAPGRAHRCAHCRRHFPGWVALWLHTRRCQARLPLPCPECGRRFRHAPFLALHRQVHAAATPDLGFACHLCGQSFRGWVALVLHLRAHSAAKRPIACPKCERRFWRRKQLRAHLRRCHPPAPEARPFICGNCGRSFAQWDQLVAHKRVHVAEALEEAAAKALGPRPRGRPAVTAPRPGGDAVDRPFQCACCGKRFRHKPNLIAHRRVHTGERPHQCPECGKRFTNKPYLTSHRRIHTGEKPYPCKECGRRFRHKPNLLSHSKIHKRSEGSAQAAPGPGSPQLPAGPQESAAEPTPAVPLKPAQEPPPGAPPEHPQDPIEAPPSLYSCDDCGRSFRLERFLRAHQRQHTGERPFTCAECGKNFGKKTHLVAHSRVHSGERPFACEECGRRFSQGSHLAAHRRDHAPDRPFVCPDCGKAFRHKPYLAAHRRIHTGEKPYVCPDCGKAFSQKSNLVSHRRIHTGERPYACPDCDRSFSQKSNLITHRKSHIRDGAFCCAICGQTFDDEERLLAHQKKHDV

SEQ ID NO: 11335 - protein, 87 aa, Homo Sapiens
MGIGVSLLLQFSLTPGGYRSVGRSRRCSRGSIPRNIPKRSWKKPHPQLCSLQGLVIFDVSQLLHLLNRELSVCLSSFSELLCSSDVA

SEQ ID NO: 11336 - protein, 136 aa, Homo Sapiens
MGIGVSLLLQFSLTPGGYRSVGRSRRCSRGSIPRNIPKRSWKKPHPQLCSLQGSSVSVCPASQSCCAARMWHRKQQTQGEGSIRHCREQWPHFLQRKNRCWNVVAGAPWPWAWPSPDSFLGPPRSHPRPWGRSPAG

SEQ ID NO: 11337 - protein, 136 aa, Homo Sapiens; identical to SEQ ID NO: 11336

SEQ ID NO: 11338 - protein, 146 aa, Homo Sapiens
MLERRCRGPLAMGLAQPRLLSGPSQESPQTLGKESRGLRQQGTSVAQSGAQAPGRAHRCAHCRRHFPGWVALWLHTRRCQARLPLPCPECGRRFRHAPFLALHRQVHAAATPDLGFACHLCGQSFRGWVALVLHLRAHSAAKRPIA

SEQ ID NO: 11339 - protein, 567 aa, Homo Sapiens
MLERRCRGPLAMGLAQPRLLSGPSQESPQTLGKESRGLRQQGTSVAQSGAQAPGRAHRCAHCRRHFPGWVALWLHTRRCQARLPLPCPECGRRFRHAPFLALHRQVHAAATPDLGFACHLCGQSFRGWVALVLHLRAHSAAKRPIACPKCERRFWRRKQLRAHLRRCHPPAPEARPFICGNCGRSFAQWDQLVAHKRVHVAEALEEAAAKALGPRPRGRPAVTAPRPGGDAVDRPFQCACCGKRFRHKPNLIAHRRVHTGERPHQCPECGKRFTNKPYLTSHRRIHTGEKPYPCKECGRRFRHKPNLLSHSKIHKRSEGSAQAAPGPGSPQLPAGPQESAAEPTPAVPLKPAQEPPPGAPPEHPQDPIEAPPSLYSCDDCGRSFRLERFLRAHQRQHTGERPFTCAECGKNFGKKTHLVAHSRVHSGERPFACEECGRRFSQGSHLAAHRRDHAPDRPFVCPDCGKAFRHKPYLAAHRRIHTGEKPYVCPDCGKAFSQKSNLVSHRRIHTGERPYACPDCDRSFSQKSNLITHRKSHIRDGAFCCAICGQTFDDEERLLAHQKKHDV

SEQ ID NO: 11340 - protein, 567 aa, Homo Sapiens; identical to SEQ ID NO: 11339

SEQ ID NO: 11341 - protein, 567 aa, Homo Sapiens; identical to SEQ ID NO: 11339

SEQ ID NO: 11342 - protein, 659 aa, Homo Sapiens
MEAAAAAAAAAAAAAAAGGGCGSGPPPLLLSEGEQQCYSELFARCAGAAGGGPGSGPPEAARVAPGTATAAAGPVADLFRASQLPAETLHQITELCGAKRVGYFGPTQFYIALKLIAAAQSGLPVRIESIKCELPLPRFMMSKNDGEIRFGNPAELHGTKVQIPYLTTEKNSFKRMDDEDKQETQSPTMSPLASPPSSPPHYQRVPLSHGYSKLRSSAEQMHPAPYEARQPLVQPEGSSSGGPGTKPLRHQASLIRSFSVERELQDNSSYPDEPWRITEEQREYYVNQFRSLQPDPSSFISGSVAKNFFTKSKLSIPELSYIWELSDADCDGALTLPEFCAAFHLIVARKNGYPLPEGLPPTLQPEYLQAAFPKPKWDCQLFDSYSESLPANQQPRDLNRMEKTSVKDMADLPVPNQDVTSDDKQALKSTINEALPKDVSEDPATPKDSNSLKARPRSRSYSSTSIEEAMKRGEDPPTPPPRPQKTHSRASSLDLNKVFQPSVPATKSGLLPPPPALPPRPCPSQSEQVSEAELLPQLSRAPSQAAESSPAKKDVLYSQPPSKPIRRKFRPENQATENQEPSTAASGPASAATMKPHPTVQKQSSKQKKAIQTAIRKNKEANAVLARLNSELQQQLKEVHQERIALENQLEQLRPVTVL

SEQ ID NO: 11343 - protein, 660 aa, Homo Sapiens
MEAAAAAAAAAAAAAAAGGGCGSGPPPLLLSEGEQQCYSELFARCAGAAGGGPGSGPPEAARVAPGTATAAAGPVADLFRASQLPAETLHQITELCGAKRVGYFGPTQFYIALKLIAAAQSGLPVRIESIKCELPLPRFMMSKNDGEIRFGNPAELHGTKVQIPYLTTEKNSFKRMDDEDKQQETQSPTMSPLASPPSSPPHYQRVPLSHGYSKLRSSAEQMHPAPYEARQPLVQPEGSSSGGPGTKPLRHQASLIRSFSVERELQDNSSYPDEPWRITEEQREYYVNQFRSLQPDPSSFISGSVAKNFFTKSKLSIPELSYIWELSDADCDGALTLPEFCAAFHLIVARKNGYPLPEGLPPTLQPEYLQAAFPKPKWDCQLFDSYSESLPANQQPRDLNRMEKTSVKDMADLPVPNQDVTSDDKQALKSTINEALPKDVSEDPATPKDSNSLKARPRSRSYSSTSIEEAMKRGEDPPTPPPRPQKTHSRASSLDLNKVFQPSVPATKSGLLPPPPALPPRPCPSQSEQVSEAELLPQLSRAPSQAAESSPAKKDVLYSQPPSKPIRRKFRPENQATENQEPSTAASGPASAATMKPHPTVQKQSSKQKKAIQTAIRKNKEANAVLARLNSELQQQLKEVHQERIALENQLEQLRPVTVL

SEQ ID NO: 11344 - protein, 181 aa, Homo Sapiens
MAKATSGAAGLRLLLLLLLPLLGKDVAEEAGCPLSCAVSKRRLECEECGGLGSPTGRCEWRQGDGKGITRNFSTCSPSTKTCPDGHCDVVETQDINICPQDCLRGSIVGGHEPGEPRGIKAGYGTCNCFPEEEKCFCEPEDIQDPLCDELCRTVIAAAVLFSFIVSVLLSAFCIHCYHKFA

SEQ ID NO: 11345 - protein, 1114 aa, Homo Sapiens
MAKATSGAAGLRLLLLLLLPLLGKVALGLYFSRDAYWEKLYVDQAAGTPLLYVHALRDAPEEVPSFRLGQHLYGTYRTRLHENNWICIQEDTGLLYLNRSLDHSSWEKLSVRNRGFPLLTVYLKVFLSPTSLREGECQWPGCARVYFSFFNTSFPACSSLKPRELCFPETRPSFRIRENRPPGTFHQFRLLPVQFLCPNISVAYRLLEGEGLPFRCAPDSLEVSTRWALDREQREKYELVAVCTVHAGAREEVVMVPFPVTVYDEDDSAPTFPAGVDTASAVVEFKRKEDTVVATLRVFDADVVPASGELVRRYTSTLLPGDTWAQQTFRVEHWPNETSVQANGSFVRATVHDYRLVLNRNLSISENRTMQLAVLVNDSDFQGPGAGVLLLHFNVSVLPVSLHLPSTYSLSVSRRARRFAQIGKVCVENCQAFSGINVQYKLHSSGANCSTLGVVTSAEDTSGILFVNDTKALRRPKCAELHYMVVATDQQTSRQAQAQLLVTVEGSYVAEEAGCPLSCAVSKRRLECEECGGLGSPTGRCEWRQGDGKGITRNFSTCSPSTKTCPDGHCDVVETQDINICPQDCLRGSIVGGHEPGEPRGIKAGYGTCNCFPEEEKCFCEPEDIQDPLCDELCRTVIAAAVLFSFIVSVLLSAFCIHCYHKFAHKPPISSAEMTFRRPAQAFPVSYSSSGARRPSLDSMENQVSVDAFKILEDPKWEFPRKNLVLGKTLGEGEFGKVVKATAFHLKGRAGYTTVAVKMLKENASPSELRDLLSEFNVLKQVNHPHVIKLYGACSQDGPLLLIVEYAKYGSLRGFLRESRKVGPGYLGSGGSRNSSSLDHPDERALTMGDLISFAWQISQGMQYLAEMKLVHRDLAARNILVAEGRKMKISDFGLSRDVYEEDSYVKRSQGRIPVKWMAIESLFDHIYTTQSDVWSFGVLLWEIVTLGGNPYPGIPPERLFNLLKTGHRMERPDNCSEEMYRLMLQCWKQEPDKRPVFADISKDLEKMMVKRRDYLDLAASTPSDSLIYDDGLSEEETPLVDCNNAPLPRALPSTWIENKLYGMSDPNWPGESPVPLTRADGTNTGFPRYPNDSVYANWMLSPSAAKLMDTFDS

SEQ ID NO: 11346 - protein, 1072 aa, Homo Sapiens
MAKATSGAAGLRLLLLLLLPLLGKVALGLYFSRDAYWEKLYVDQAAGTPLLYVHALRDAPEEVPSFRLGQHLYGTYRTRLHENNWICIQEDTGLLYLNRSLDHSSWEKLSVRNRGFPLLTVYLKVFLSPTSLREGECQWPGCARVYFSFFNTSFPACSSLKPRELCFPETRPSFRIRENRPPGTFHQFRLLPVQFLCPNISVAYRLLEGEGLPFRCAPDSLEVSTRWALDREQREKYELVAVCTVHAGAREEVVMVPFPVTVYDEDDSAPTFPAGVDTASAVVEFKRKEDTVVATLRVFDADVVPASGELVRRYTSTLLPGDTWAQQTFRVEHWPNETSVQANGSFVRATVHDYRLVLNRNLSISENRTMQLAVLVNDSDFQGPGAGVLLLHFNVSVLPVSLHLPSTYSLSVSRRARRFAQIGKVCVENCQAFSGINVQYKLHSSGANCSTLGVVTSAEDTSGILFVNDTKALRRPKCAELHYMVVATDQQTSRQAQAQLLVTVEGSYVAEEAGCPLSCAVSKRRLECEECGGLGSPTGRCEWRQGDGKGITRNFSTCSPSTKTCPDGHCDVVETQDINICPQDCLRGSIVGGHEPGEPRGIKAGYGTCNCFPEEEKCFCEPEDIQDPLCDELCRTVIAAAVLFSFIVSVLLSAFCIHCYHKFAHKPPISSAEMTFRRPAQAFPVSYSSSGARRPSLDSMENQVSVDAFKILEDPKWEFPRKNLVLGKTLGEGEFGKVVKATAFHLKGRAGYTTVAVKMLKENASPSELRDLLSEFNVLKQVNHPHVIKLYGACSQDGPLLLIVEYAKYGSLRGFLRESRKVGPGYLGSGGSRNSSSLDHPDERALTMGDLISFAWQISQGMQYLAEMKLVHRDLAARNILVAEGRKMKISDFGLSRDVYEEDSYVKRSQGRIPVKWMAIESLFDHIYTTQSDVWSFGVLLWEIVTLGGNPYPGIPPERLFNLLKTGHRMERPDNCSEEMYRLMLQCWKQEPDKRPVFADISKDLEKMMVKRRDYLDLAASTPSDSLIYDDGLSEEETPLVDCNNAPLPRALPSTWIENKLYGRISHAFTRF

SEQ ID NO: 11347 - protein, 458 aa, Homo Sapiens
MAKATSGAAGLRLLLLLLLPLLGKVALGLYFSRDAYWEKLYVDQAAGTPLLYVHALRDAPEEVPSFRLGQHLYGTYRTRLHENNWICIQEDTGLLYLNRSLDHSSWEKLSVRNRGFPLLTVYLKVFLSPTSLREGECQWPGCARVYFSFFNTSFPACSSLKPRELCFPETRPSFRIRENRPPGTFHQFRLLPVQFLCPNISVAYRLLEGEGLPFRCAPDSLEVSTRWALDREQREKYELVAVCTVHAGAREEVVMVPFPVTVYDEDDSAPTFPAGVDTASAVVEFKRKEDTVVATLRVFDADVVPASGELVRRYTSTLLPGDTWAQQTFRVEHWPNETSVQANGSFVRATVHDYRLVLNRNLSISENRTMQLAVLVNDSDFQGPGAGVLLLHFNVSVLPVSLHLPSTYSLSVSRRARRFAQIGKVCVENCLADLTGDAVSGRDEARSSGLGSQKHPGS

SEQ ID NO: 11348 - protein, 114 aa, Homo Sapiens
  misc_feature (1)..(1): Xaa can be any naturally occurring amino acid
XDAYWEKLYVDQAAGTPLLYVHALRDAPEEVPSFRLGQHLYGTYRTRLHENNWICIQEDTGLLYLNRSLDHSSWEKLSVRNVADAPTDLTSLCRPRLSPAHRLPQGLPVTHIPS

SEQ ID NO: 11349 - protein, 191 aa, Homo Sapiens
  misc_feature (1)..(1): Xaa can be any naturally occurring amino acid
XDAYWEKLYVDQAAGTPLLYVHALRDAPEEVPSFRLGQHLYGTYRTRLHENNWICIQEDTGLLYLNRSLDHSSWEKLSVRTCSSLKPRELCFPETRPSFRIRENRPPGTFHQFRLLPVQFLCPNISVAYRLLEGECRPCGAAPQCLLLLVLLCEPLTQAIWFILHLHAISSFNIPEVPLACLPGARYCSRS

SEQ ID NO: 11350 - protein, 108 aa, Homo Sapiens
MKALCLLLLPVLGLLVSSKTLCSMEEAINERIQEVAGSLIFRAISSIGLECQSVTSRGDLATCPRGFAVTGCTCGSACGSWDVRAETTCHCQCAGMDWTGARCCRVQP

SEQ ID NO: 11351 - protein, 82 aa, Homo Sapiens
MKALCLLLLPVLGLLVSSKTLCSMEEAINERIQEVAGSLSFAVTGCTCGSACGSWDVRAETTCHCQCAGMDWTGARCCRVQP

SEQ ID NO: 11352 - protein, 82 aa, Homo Sapiens; identical to SEQ ID NO: 11351

SEQ ID NO: 11353 - protein, 111 aa, Homo Sapiens
MGPSSCLLLILIPLLQLINPGSTQCSLDSVMDKKIKDVLNSLEYSPSPISKKLSCASVKSQGRPSSCPAGMAVTGCACGYGCGSWDVQLETTCHCQCSVVDWTTARCCHLT

SEQ ID NO: 11354 - protein, 610 aa, Homo Sapiens
MWLPLVLLLAVLLLAVLCKVYLGLFSGSSPNPFSEDVKRPPAPLVTDKEARKKVLKQAFSANQVPEKLDVVVIGSGFGGLAAAAILAKAGKRVLVLEQHTKAGGCCHTFGKNGLEFDTGIHYIGRMEEGSIGRFILDQITEGQLDWAPLSSPFDIMVLEGPNGRKEYPMYSGEKAYIQGLKEKFPQEEAIIDKYIKLVKVVSSGAPHAILLKFLPLPVVQLLDRCGLLTRFSPFLQASTQSLAEVLQQLGASSELQAVLSYIFPTYGVTPNHSAFSMHALLVNHYMKGGFYPRGGSSEIAFHTIPVIQRAGGAVLTKATVQSVLLDSAGKACGVSVKKGHELVNIYCPIVVSNAGLFNTYEHLLPGNARCLPGVKQQLGTVRPGLGMTSVFICLRGTKEDLHLPSTNYYVYYDTDMDQAMERYVSMPREEAAEHIPLLFFAFPSAKDPTWEDRFPGRSTMIMLIPTAYEWFEEWQAELKGKRGSDYETFKNSFVEASMSVVLKLFPQLEGKVESVTAGSPLTNQFYLAAPRGACYGADHDLGRLHPCVMASLRAQSPIPNLYLTGQDIFTCGLVGALQGALLCSSAILKRNLYSDLKNLDSRIRAQKKKN

SEQ ID NO: 11355 - protein, 140 aa, Homo Sapiens
  misc_feature (1)..(1): Xaa can be any naturally occurring amino acid
XFHTIPVIQRAGGAVLTKATVQSVLLDSAGKACGVSVKKGHELVNIYCPIVVSNAGLFNTYEHLLPGNARCLPGKRRVCTAPLAGSPMCPLLEPTCSVWVMLLLFLAGPLIVLKQQGENATSNIILTLAFNVGETEAHTD

SEQ ID NO: 11356 - protein, 320 aa, Homo Sapiens
  misc_feature (1)..(1): Xaa can be any naturally occurring amino acid
XGRKEYPMYSGEKAYIQGLKEKFPQEEAIIDKYIKLVKVVSSGAPHAILLKFLPLPVVQLLDRCGLLTRFSPFLQASTQSLAEVLQQLGASSELQAVLSYIFPTYGVTPNHSAFSMHALLVNHYMKGGFYPRGGSSEIAFHTIPVIQRAGGAVLTKATVQSVLLDSAGKACGVSVKKGHELVNIYCPIVVSNAGLFNTYEHLLPGNARCLPGVKQQLGTVRPGLGMTSVFICLRGTKEDLHLPSTNYYVYYDTDMDQAMERYVSMPREEAAEHIPLLFFAFPSAKDPTWEDRFPGGECDCRIPTHQPVLSGCSPRCLLRG

SEQ ID NO: 11357 - protein, 399 aa, Homo Sapiens
  misc_feature (1)..(1): Xaa can be any naturally occurring amino acid
XPLVLLLAVLLLAVLCKVYLGLFSGSSPNPFSEDVKRPPAPLVTDKEARKKVLKQGVTPNHSAFSMHALLVNHYMKGGFYPRGGSSEIAFHTIPVIQRAGGAVLTKATVQSVLLDSAGKACGVSVKKGHELVNIYCPIVVSNAGLFNTYEHLLPGNARCLPGVKQQLGTVRPGLGMTSVFICLRGTKEDLHLPSTNYYVYYDTDMDQAMERYVSMPREEAAEHIPLLFFAFPSAKDPTWEDRFPGRSTMIMLIPTAYEWFEEWQAELKGKRGSDYETFKNSFVEASMSVVLKLFPQLEGKVESVTAGSPLTNQFYLAAPRGACYGADHDLGRLHPCVMASLRAQSPIPNLYLTGQDIFTCGLVGALQGALLCSSAILKRNLYSDLKNLDSRIRAQKKKN

SEQ ID NO: 11358 - protein, 255 aa, Homo Sapiens
  misc_feature (1)..(1): Xaa can be any naturally occurring amino acid
XWLPLVLLLAVLLLAVLCKVYLGLFSGSSPNPFSEDVKRPPAPLVTDKEARKKVLKQGIHYIGRMEEGSIGRFILDQITEGQLDWAPLSSPFDIMVLEGPNGRKEYPMYSGEKAYIQGLKEKFPQEEAIIDKYIKLVKVVSSGAPHAILLKFLPLPVVQLLDRCGLLTRFSPFLQASTQSLAEVLQQLGASSELQAVLSYIFPTYGVTPNHSAFSMHALLVNHYMKGGFYPRGGSSEIAFHTIPVIQRAGGAVLT

SEQ ID NO: 11359 - protein, 331 aa, Homo Sapiens
MSRARGALCRACLALAAALAALLLLPLPLPRAPAPARTPAPAPRAPPSRPAAPSLRPDDVFIAVKTTRKNHGPRLRLLLRTWISRARQQTFIFTDGDDPELELQGGDRVINTNCSAVRTRQALCCKMSVEYDKFIESGRKWFCHVDDDNYVNARSLLHLLSSFSPSQDVYLGRPSLDHPIEATERVQGGRTVTTVKFWFATGGAGFCLSRGLALKMSPWASLGSFMSTAEQVRLPDDCTVGYIVEGLLGARLLHSPLFHSHLENLQRLPPDTLLQQVTLSHGGPENPHNVVNVAGGFSLHQDPTRFKSIHCLLYPDTDWCPRQKQGAPTSR

SEQ ID NO: 11360 - protein, 60 aa, Homo Sapiens
MSVEYDKFIESGRKWFCHVDDDNYVNARSLLHLLSSFSPSQDVYLGRPSLDHPIEATERV

SEQ ID NO: 11361 - protein, 205 aa, Homo Sapiens
MSVEYDKFIESGRKWFCHVDDDNYVNARSLLHLLSSFSPSQDVYLGRPSLDHPIEATERVQGGRTVTTVKFWFATGGAGFCLSRGLALKMSPWASLGSFMSTAEQVRLPDDCTVGYIVEGLLGARLLHSPLFHSHLENLQRLPPDTLLQQVTLSHGGPENPHNVVNVAGGFSLHQDPTRFKSIHCLLYPDTDWCPRQKQGAPTSR

SEQ ID NO: 11362 - protein, 137 aa, Homo Sapiens
MKPPAAQGSPAAAAAAAPALDSAAAEDLSDALCEFDAVLADFASPFHERHFHYEEHLERMKRRSSASVSDSSGFSDSESADSLYRNSFSFSDEKLNSPTDSTPALLSATVTPQKAKLGDTKELEAFIADLDKTLASM

SEQ ID NO: 11363 - protein, 337 aa, Homo Sapiens
MPALEPAPPLLADLGPALEPESPAALGPPGYLHSAPGPAPAPGEGPPPGTVLEPQSAPESSCPCRGSVKNQPSEELPDMTTFPPRLLAEQLTLMDAELFKKVVLHECLGCIWGQGHLKGNEHMAPTVRATIAHFNRLTNCITTSCLGDHSMRARDRARVVEHWIKVARECLSLNNFSSVHVIVSALCSNPIGQLHKTWAGVSSKSMKELKELCKKDTAVKRDLLIKAGSFKVATQERNPQRVQMRLRRQKKGVVPFLGDFLTELQRLDSAIPDDLDGNTNKRSKEVRVLQEMQLLQVAAMNYRLRPLEKFVTYFTRMEQLSDKESYKLSCQLEPENP

SEQ ID NO: 11364 - protein, 356 aa, Homo Sapiens
MPALEPAPPLLADLGPALEPESPAALGPPGYLHSAPGPAPAPGEGPPPGTVLEPQSAPESSCPCRGSVKNQPSEELPDMTTFPPRLLAEQLTLMDAELFKKVVLHECLGCIWGQGHLKGNEHMAPTVRATIAHFNRLTNCITTSCLGDHSMRARDRARVVEHWIKVARECLSLNNFSSVHVIVSALCSNPIGQLHKTWAGVSSKSMKELKELCKKDTAVKRDLLIKAGSFKVATQERNPQRVQMRLRRQKKGVVPFLGDFLTELQRLDSAIPDDLDGNTNKRSKEVRVLQEMQLLQVAAMNYRLRPLEKFVTYFTRMEQLSDKERWGFTMMSRIVSNSWPQAIHPPQPPKVLTLQV

SEQ ID NO: 11365 - protein, 410 aa, Homo Sapiens
MPALEPAPPLLADLGPALEPESPAALGPPGYLHSAPGPAPAPGEGPPPGTVLEPQSAPESSCPCRGSVKNQPSEELPDMTTFPPRLLAEQLTLMDAELFKKVVLHECLGCIWGQGHLKGNEHMAPTVRATIAHFNRLTNCITTSCLGDHSMRARDRARVVEHWIKVARECLSLNNFSSVHVIVSALCSNPIGQLHKTWAGVSSKSMKELKELCKKDTAVKRDLLIKAGSFKVATQERNPQRVQMRLRRQKKGVVPFLGDFLTELQRLDSAIPDDLDGNTNKRSKEVRVLQEMQLLQVAAMNYRLRPLEKFVTYFTRMEQLSDKERLHCSVTISVHCNVCLLGSSPSSASQAAGTTAVHHHVRLFCCCCSATSCPASWSPKTRRLATSCSGWEPTGMLARTPALHHPSPRP

SEQ ID NO: 11366 - protein, 473 aa, Homo Sapiens
MRKLLTNLPAAAVLSAQVYSAVLQGLWEENVCGTPGRTRVCTALLYGQVCPFQDSTDGLRTITSILFNWPPENTSVYYQPPQRSSFRIKLAFRNLSWPGLGLEDHQEIVLGQLVLPEPNEAKPDDPAPRPGQHALTMPALEPAPPLLADLGPALEPESPAALGPPGYLHSAPGPAPAPGEGPPPGTVLEPQSAPESSCPCRGSVKNQPSEELPDMTTFPPRLLAEQLTLMDAELFKKVVLHECLGCIWGQGHLKGNEHMAPTVRATIAHFNRLTNCITTSCLGDHSMRARDRARVVEHWIKVARECLSLNNFSSVHVIVSALCSNPIGQLHKTWAGVSSKSMKELKELCKKDTAVKRDLLIKAGSFKVATQERNPQRVQMRLRRQKKGVVPFLGDFLTELQRLDSAIPDDLDGNTNKRSKEVRVLQEMQLLQVAAMNYRLRPLEKFVTYFTRMEQLSDKESYKLSCQLEPENP

SEQ ID NO: 11367 - protein, 536 aa, Homo Sapiens
MRKLLTNLPAAAVLSAQVYSAVLQGLWEENVCGTPGRTRVCTALLYGQVCPFQDSTDGLRTITSILFNWPPENTSVYYQPPQRSSFRIKLAFRNLSWPGLGLEDHQEIVLGQLVLPEPNEAKPDDPAPRPGQHALTMPALEPAPPLLADLGPALEPESPAALGPPGYLHSAPGPAPAPGEGPPPGTVLEPQSAPESSCPCRGSVKNQPSEELPDMTTFPPRLLAEQLTLMDAELFKKVVLHECLGCIWGQGHLKGNEHMAPTVRATIAHFNRLTNCITTSCLGDHSMRARDRARVVEHWIKVARECLSLNNFSSVHVIVSALCSNPIGQLHKTWAGVSSKSMKELKELCKKDTAVKRDLLIKAGSFKVATQERNPQRVQMRLRRQKKGVVPFLGDFLTELQRLDSAIPDDLDGNTNKRSKEVRVLQEMQLLQVAAMNYRLRPLEKFVTYFTRMEQLSDKERWGFTMMSRIVSNSWPQAIHPPQPPKVLTLQLQAVLPAGARKPVGWQHPAVAGNPPGCWPEHRLCTIPHPDRRHQG

SEQ ID NO: 11368 - protein, 435 aa, Homo Sapiens
MRKLLTNLPAAAVLSAQVYSAVLQGLWEENVCGTPGRTRVCTALLYGQVCPFQDSTDGLRTITSILFNWPPENTSVYYQPPQRSSFRIKLAFRNLSWPGLGLEDHQEIVLGQLVLPEPNEAKPDDPAPRPGQHALTMPALEPAPPLLADLGPALEPESPAALGPPGYLHSAPGPAPAPGEGPPPGTVLEPQSAPESSCPCRGSVKNQPSEELPDMTTFPPRLLAEQLTLMDAELFKKVVLHECLGCIWGQGHLKGNEHMAPTVRATIAHFNRLTNCITTSCLGDHSMRARDRARVVEHWIKVARECLSLNNFSSVHVIVSALCSNPIGQLHKTWAGVSSKSMKELKELCKKDTAVKRDLLIKRDDGENNGNSYRKLSPQRPCEVAVVCITLYRRGNSLREARLQDWVTHTGSVDLGQWRGALRWPPRRGTPRESR

SEQ ID NO: 11369 - protein, 155 aa, Homo Sapiens
  misc_feature (1)..(1): Xaa can be any naturally occurring amino acid
XWASGMSTVPGGSRHSLGIQVRGGWGVTGGEEESLTVPVADTWQAGSFKVATQERNPQRVQMRLRRQKKGVVPFLGDFLTELQRLDSAIPDDLDGNTNKRSKEVRVLQEMQLLQVAAMNYRLRPLEKFVTYFTRMEQLSDKESYKLSCQLEPENP

SEQ ID NO: 11370 - protein, 458 aa, Homo Sapiens
MGGLGPRRAGTSRERLVVTGRAGWMGMGRGAGRSALGFWPTLAFLLCSFPAATSPCKILKCNSEFWSATSGSHAPASDDTPEFCAALRSYALCTRRTARTCRGDLAYHSAVHGIEDLMSQHNCSKDGPTSQPRLRTLPPAGDSQERSDSPEICHYEKSFHKHSATPNYTHCGLFGDPHLRTFTDRFQTCKVQGAWPLIDNNYLNVQVTNTPVLPGSAATATSKLTIIFKNFQECVDQKVYQAEMDELPAAFVDGSKNGGDKHGANSLKITEKVSGQHVEIQAKYIGTTIVVRQVGRYLTFAVRMPEEVVNAVEDWDSQGLYLCLRGCPLNQQIDFQAFHTNAEGTGARRLAAASPAPTAPETFPYETAVAKCKEKLPVEDLYYQACVFDLLTTGDVNFTLAAYYALEDVKMLHSNKDKLHLYERTRDLPGRAAAGLPLAPRPLLGALVPLLALLPVFC

SEQ ID NO: 11371 - protein, 10 aa, Homo Sapiens
MGMGRGAGRS

SEQ ID NO: 11372 - protein, 46 aa, Homo Sapiens
MGMGRGAGRSALGFWPTLAFLLCSFPAAHHHLQELPGVCGPEGVPG

SEQ ID NO: 11373 - protein, 61 aa, Homo Sapiens
MGMGRGAGRSALGFWPTLAFLLCSFPAAIKRSPGSFCAALEMRRLWNLMSWKERRVQKPLM

SEQ ID NO: 11374 - protein, 90 aa, Homo Sapiens
MGMGRGAGRSALGFWPTLAFLLCSFPAATSPCKILKCNSEFWSATSGSHAPASDDTPEFCAALRSYALCTRRTARTCRGDLAYHSAVHGI

SEQ ID NO: 11375 - protein, 434 aa, Homo Sapiens
MGMGRGAGRSALGFWPTLAFLLCSFPAATSPCKILKCNSEFWSATSGSHAPASDDTPEFCAALRSYALCTRRTARTCRGDLAYHSAVHGIEDLMSQHNCSKDGPTSQPRLRTLPPAGDSQERSDSPEICHYEKSFHKHSATPNYTHCGLFGDPHLRTFTDRFQTCKVQGAWPLIDNNYLNVQVTNTPVLPGSAATATSKLTIIFKNFQECVDQKVYQAEMDELPAAFVDGSKNGGDKHGANSLKITEKVSGQHVEIQAKYIGTTIVVRQVGRYLTFAVRMPEEVVNAVEDWDSQGLYLCLRGCPLNQQIDFQAFHTNAEGTGARRLAAASPAPTAPETFPYETAVAKCKEKLPVEDLYYQACVFDLLTTGDVNFTLAAYYALEDVKMLHSNKDKLHLYERTRDLPGRAAAGLPLAPRPLLGALVPLLALLPVFC

SEQ ID NO: 11376 - protein, 434 aa, Homo Sapiens; identical to SEQ ID NO: 11375

SEQ ID NO: 11377 - protein, 434 aa, Homo Sapiens; identical to SEQ ID NO: 11375

SEQ ID NO: 11378 - protein, 450 aa, Homo Sapiens
MQPPRERLVVTGRAGWMGMGRGAGRSALGFWPTLAFLLCSFPAATSPCKILKCNSEFWSATSGSHAPASDDTPEFCAALRSYALCTRRTARTCRGDLAYHSAVHGIEDLMSQHNCSKDGPTSQPRLRTLPPAGDSQERSDSPEICHYEKSFHKHSATPNYTHCGLFGDPHLRTFTDRFQTCKVQGAWPLIDNNYLNVQVTNTPVLPGSAATATSKLTIIFKNFQECVDQKVYQAEMDELPAAFVDGSKNGGDKHGANSLKITEKVSGQHVEIQAKYIGTTIVVRQVGRYLTFAVRMPEEVVNAVEDWDSQGLYLCLRGCPLNQQIDFQAFHTNAEGTGARRLAAASPAPTAPETFPYETAVAKCKEKLPVEDLYYQACVFDLLTTGDVNFTLAAYYALEDVKMLHSNKDKLHLYERTRDLPGRAAAGLPLAPRPLLGALVPLLALLPVFC

SEQ ID NO: 11379 - protein, 341 aa, Homo Sapiens
MSQHNCSKDGPTSQPRLRTLPPAGDSQERSDSPEICHYEKSFHKHSATPNYTHCGLFGDPHLRTFTDRFQTCKVQGAWPLIDNNYLNVQVTNTPVLPGSAATATSKLTIIFKNFQECVDQKVYQAEMDELPAAFVDGSKNGGDKHGANSLKITEKVSGQHVEIQAKYIGTTIVVRQVGRYLTFAVRMPEEVVNAVEDWDSQGLYLCLRGCPLNQQIDFQAFHTNAEGTGARRLAAASPAPTAPETFPYETAVAKCKEKLPVEDLYYQACVFDLLTTGDVNFTLAAYYALEDVKMLHSNKDKLHLYERTRDLPGRAAAGLPLAPRPLLGALVPLLALLPVFC

SEQ ID NO: 11380 - protein, 437 aa, Homo Sapiens
MGLRAAPSSAAAAAAEVEQRRSPGLCPPPLELLLLLLFSLGLLHAGDCQQPAQCRIQKCTTDFVSLTSHLNSAVDGFDSEFCKALRAYAGCTQRTSKACRGNLVYHSAVLGISDLMSQRNCSKDGPTSSTNPEVTHDPCNYHSHAGAREHRRGDQNPPSYLFCGLFGDPHLRTFKDNFQTCKVEGAWPLIDNNYLSVQVTNVPVVPGSSATATNKITIIFKAHHECTDQKVYQAVTDDLPAAFVDGTTSGGDSDAKSLRIVERESGHYVEMHARYIGTTVFVRQVGRYLTLAIRMPEDLAMSYEESQDLQLCVNGCPLSERIDDGQGQVSAILGHSLPRTSLVQAWPGYTLETANTQCHEKMPVKDIYFQSCVFDLLTTGDANFTAAAHSALEDVEALHPRKERWHIFPSSGNGTPRGGSDLSVSLGLTCLILIVFL

SEQ ID NO: 11381 - protein, 478 aa, Homo Sapiens
MIRKKRKRSAPPGPCRSHGPRPATAPAPPPSPEPTRPAWTGMGLRAAPSSAAAAAAEVEQRRSPGLCPPPLELLLLLLFSLGLLHAGDCQQPAQCRIQKCTTDFVSLTSHLNSAVDGFDSEFCKALRAYAGCTQRTSKACRGNLVYHSAVLGISDLMSQRNCSKDGPTSSTNPEVTHDPCNYHSHAGAREHRRGDQNPPSYLFCGLFGDPHLRTFKDNFQTCKVEGAWPLIDNNYLSVQVTNVPVVPGSSATATNKITIIFKAHHECTDQKVYQAVTDDLPAAFVDGTTSGGDSDAKSLRIVERESGHYVEMHARYIGTTVFVRQVGRYLTLAIRMPEDLAMSYEESQDLQLCVNGCPLSERIDDGQGQVSAILGHSLPRTSLVQAWPGYTLETANTQCHEKMPVKDIYFQSCVFDLLTTGDANFTAAAHSALEDVEALHPRKERWHIFPSSGNGTPRGGSDLSVSLGLTCLILIVFL

SEQ ID NO: 11382 - protein, 50 aa, Homo Sapiens
MAHGPGALMLKCVVVGDGAVGKTCLLMSYANDAFPEEYVPTVFDHYAGRL

SEQ ID NO: 11383 - protein, 205 aa, Homo Sapiens
MAHGPGALMLKCVVVGDGAVGKTCLLMSYANDAFPEEYVPTVFDHYAVSVTVGGKQYLLGLYDTAGQEDYDRLRPLSYPMTDVFLICFSVVNPASFQNVKEEWVPELKEYAPNVPFLLIGTQIDLRDDPKTLARLNDMKEKPICVEQGQKLAKEIGACCYVECSALTQKGLKTVFDEAIIAILTPKKHTVKKRIGSRCINCCLIT

SEQ ID NO: 11384 - protein, 75 aa, Homo Sapiens
MTDVFLICFSVVNPASFQNVKEEWVPELKEYAPNVPFLLIGTQIDLRDDPKTLARLNDMKEKPICVEQGQKLAKE

SEQ ID NO: 11385 - protein, 91 aa, Homo Sapiens
PEEYVPTVFDHYAVSVTVGGKQYLLGLYDTAGQALQQSELDFWEEISVSSGSWGHVITFSFHTRAWVSSGQDLLCPLAPASAVLLLDRGRL

SEQ ID NO: 11386 - protein, 34 aa, Homo Sapiens
  misc_feature (1)..(1): Xaa can be any naturally occurring amino acid
XGGKQYLLGLYDTAGQEDTGELAVRSCDFDKSIF

SEQ ID NO: 11387 - protein, 45 aa, Homo Sapiens
MAYSTVQRVALASGLVLALSLLLPKAFLSRGKRQEPPPTPEEHRL

SEQ ID NO: 11388 - protein, 43 aa, Homo Sapiens
MAYSTVQRVALASGLVLALSLLLPKAFLSRGKRQEPPPTPEEN

SEQ ID NO: 11389 - protein, 288 aa, Homo Sapiens
MAYSTVQRVALASGLVLALSLLLPKAFLSRGKRQEPPPTPEGKLGRFPPMMHHHQAPSDGQTPGARFQRSHLAEAFAKAKGSGGGAGGGGSGRGLMGQIIPIYGFGIFLYILYILFKLSKGKTTAEDGKCYTAMPGNTHRKISYPEETYPIYDLSDCIKRRQETILVDYPDPKELSAEEIAERMGMIEEEESDHLGWESLPTDPRAQEDNSVTSCDPKPETCSCCFHEDEDPAVLAENAGFSADSYPEQEETTKEEWSQDFKDEGLGISTDKAYTGSMLRKRNPQGLE

SEQ ID NO: 11390 - protein, 368 aa, Homo Sapiens
MAYSTVQRVALASGLVLALSLLLPKAFLSRGKRQEPPPTPEGKLGRFPPMMHHHQAPSDGQTPGARFQRSHLAEAFAKAKGSGGGAGGGGSGRGLMGQIIPIYGFGIFLYILYILFKLSKGKTTAEDGKCYTAMPGNTHRKITSFELAQLQEKLKETEAAMEKLINRVGPNGERAQTVTSDQEKRLLHQLREITRVMKEGKFIDRFSPEKEAEEAPYMEDWEGYPEETYPIYDLSDCIKRRQETILVDYPDPKELSAEEIAERMGMIEEEESDHLGWESLPTDPRAQEDNSVTSCDPKPETCSCCFHEDEDPAVLAENAGFSADSYPEQEETTKEEWSQDFKDEGLGISTDKAYTGSMLRKRNPQGLE

SEQ ID NO: 11391 - protein, 369 aa, Homo Sapiens
MAYSTVQRVALASGLVLALSLLLPKAFLSRGKRQEPPPTPEGKLGRFPPMMHHHQAPSDGQTPGARFQRSHLAEAFAKAKGSGGGAGGGGSGRGLMGQIIPIYGFGIFLYILYILFKLSKGKTTAEDGKCYTAMPGNTHRKITSFELAQLQEKLKETEAAMEKLINRVGPNGESRAQTVTSDQEKRLLHQLREITRVMKEGKFIDRFSPEKEAEEAPYMEDWEGYPEETYPIYDLSDCIKRRQETILVDYPDPKELSAEEIAERMGMIEEEESDHLGWESLPTDPRAQEDNSVTSCDPKPETCSCCFHEDEDPAVLAENAGFSADSYPEQEETTKEEWSQDFKDEGLGISTDKAYTGSMLRKRNPQGLE

SEQ ID NO: 11392 - protein, 328 aa, Homo Sapiens
MAYSTVQRVALASGLVLALSLLLPKAFLSRGKRQEPPPTPEGKLGRFPPMMHHHQAPSDGQTPGARFQRSHLAEAFAKAKGSGGGAGGGGSGRGLMGQIIPIYGFGIFLYILYILFKLSKGKTTAEDGKCYTAMPGNTHRKITSFELAQLQEKLKETEAAMEKLINRVGPNGESTQTDHSDVYVHCLGVFTTKWLDCLIFLSRAQTVTSDQEKRLLHQLREITRVMKEGKFIDRFSPEKEAEEAPYMEDWEGYPEETYPIYDLSDCIKRRQETILVDYPDPKELSAEEIAERMGMIEEEESDHLGWESLPTDPRAQEDNSVTSCDPKP

SEQ ID NO: 11393 - protein, 128 aa, Homo Sapiens
MAYSTVQRVALASGLVLALSLLLPKAFLSRGKRQEPPPTPEGKLGRFPPMMHHHQAPSDGQTPGARFQRSHLAEAFAKAKGSGGGAGGGGSGRGLMGQIIPIYGFGIFLYILYILFKVSRIILIILHQ

SEQ ID NO: 11394 - protein, 187 aa, Homo Sapiens
MAYSTVQRVALASGLVLALSLLLPKAFLSRGKRQEPPPTPEGYPEETYPIYDLSDCIKRRQETILVDYPDPKELSAEEIAERMGMIEEEESDHLGWESLPTDPRAQEDNSVTSCDPKPETCSCCFHEDEDPAVLAENAGFSADSYPEQEETTKEEWSQDFKDEGLGISTDKAYTGSMLRKRNPQGLE

SEQ ID NO: 11395 - protein, 42 aa, Homo Sapiens
MSSLIRRVISTAKAPGAIGPYRTDRHGPFKWTACVRRGSRRS

SEQ ID NO: 11396 - protein, 137 aa, Homo Sapiens
MSSLIRRVISTAKAPGAIGPYSQAVLVDRTIYISGQIGMDPSSGQLVSGGVAEEAKQALKNMGEILKAAGCDFTNVVKTTVLLADINDFNTVNEIYKQYFKSNFPARAAYQVAALPKGSRIEIEAVAIQGPLTTASL

SEQ ID NO: 11397 - protein, 148 aa, Homo Sapiens
  misc_feature (1)..(1): Xaa can be any naturally occurring amino acid
XGRLSHVVLDQKGDQHRESPRGHWTLQLSVYCSQAVLVDRTIYISGQIGMDPSSGQLVSGGVAEEAKQALKNMGEILKAAGCDFTNVVKTTVLLADINDFNTVNEIYKQYFKSNFPARAAYQVAALPKGSRIEIEAVAIQGPLTTASL

SEQ ID NO: 11398 - protein, 127 aa, Homo Sapiens
  misc_feature (1)..(1): Xaa can be any naturally occurring amino acid
XSSKKPAGLVLGLLLLKGLQEGRLSHVVLDQKGDQHRESPRGHWTLQALKNMGEILKAAGCDFTNVVKTTVLLADINDFNTVNEIYKQYFKSNFPARAAYQVAALPKGSRIEIEAVAIQGPLTTASL

SEQ ID NO: 11399 - protein, 219 aa, Homo Sapiens
MAAEMRKMVRQPSRESTDGSINSYSSEGNLIFPGVRLGADSQFSDFLDGLGPAQLVGRQTLATPAMGDIQIGMEDKKGQLEVEVIRARSLTQKPGSKSTPAPYVKVYLLENGACIAKKKTRIARKTLDPLYQQSLVFDESPQGKVLQVIVWGDYGRMDHKCFMGVAQILLEELDLSSMVIGWYKLFPPSSLVDPTLTPLTRRASQSSLESSTGPPCIRS

SEQ ID NO: 11400 - protein, 1012 aa, Homo Sapiens
MCAPGIHVSSEGWEEVRSVDSEEGTIEARRAVAGDLDYYWLDPATWHSRETSPISSHPVTWQPSKEGDRLIGRVILNKRTTMPKDSGALLGLKVVGGKMTDLGRLGAFITKVKKGSLADVVGHLRAGDEVLEWNGKPLPGATNEEVYNIILESKSEPQVEIIVSRPIGDIPRIPESSHPPLESSSSSFESQKMERPSISVISPTSPGALKDAPQVLPGQLSVKLWYDKVGHQLIVNVLQATDLPARVDGRPRNPYVKMYFLPDRSDKSKRRTKTVKKILEPKWNQTFVYSHVHRRDFRERMLEITVWDQPRVQEEESEFLGEILIELETALLDDEPHWYKLQTHDESSLPLPQPSPFMPRRHIHGESSSKKLQRSQRISDSDISDYEVDDGIGVVPPGYRSSARESKSTTLTVPEQQRTTHHRSRSVSPHRGNDQGKPRSRLPNVPLQRSLDEIHPTRRSRSPTRHHDASRSPVDHRTRDVDSQYLSEQDSELLMLPRAKRGRSAECLHTTSELQPFLDRARSASTNCLRPDTSLHSPERERHSRKSERSSIQKQTRKGTASDAERMHRQRSPTQSPPADTSFSSRRGRQLPQVPVRSGSIEQASLVVEERTRQMKMKVHRFKQTTGSGSSQELDREQYSKYNIHKDQYRSCDNVSAKSSDSDVSDVSAISRTSSASRLSSTSFMSEQSERPRGRISSFTPKMQGRRMGTSGRSIMKSTSVSGEMYTLEHNDGSQSDTAVGTVGAGGKKRRSSLSAKVVAIVSRRSRSTSQLSQTESGHKKLKSTIQRSTETGMAAEMRKMVRQPSRESTDGSINSYSSEGNLIFPGVRLGADSQFSDFLDGLGPAQLVGRQTLATPAMGDIQIGMEDKKGQLEVEVIRARSLTQKPGSKSTPAPYVKVYLLENGACIAKKKTRIARKTLDPLYQQSLVFDESPQGKVLQVIVWGDYGRMDHKCFMGVAQILLEELDLSSMVIGWYKLFPPSSLVDPTLTPLTRRASQSSLESSTGPPCIRS

SEQ ID NO: 11401 - protein, 817 aa, Homo Sapiens
MCAPGIHVSSEGWEEVRSVDSEEGTIEARRAVAGDLDYYWLDPATWHSRETSPISSHPVTWQPSKEGDRLIGRVILNKRTTMPKDSGALLGLKVVGGKMTDLGRLGAFITKVKKGSLADVVGHLRAGDEVLEWNGKPLPGATNEEVYNIILESKSEPQVEIIVSRPIGDIPRIPESSHPPLESSSSSFESQKMERPSISVISPTSPGALKDAPQVLPGQLSVKLWYDKVGHQLIVNVLQATDLPARVDGRPRNPYVKMYFLPDRSDKSKRRTKTVKKILEPKWNQTFVYSHVHRRDFRERMLEITVWDQPRVQEEESEFLGEILIELETALLDDEPHWYKLQTHDESSLPLPQPSPFMPRRHIHGESSSKKLQRSQRISDSDISDYEVDDGIGVVPPVGYRSSARESKSTTLTVPEQQRTTHHRSRSVSPHRGNDQGKPRSRLPNVPLQRSLDEIHPTRRSRSPTRHHDASRSPVDHRTRDVDSQYLSEQDSELLMLPRAKRGRSAECLHTTSELQPFLDRARSASTNCLRPDTSLHSPERERMHRQRSPTQSPPADTSFSSRRGRQLPQVPVRSGSIEQESGHKKLKSTIQRSTETGMAAEMRKMVRQPSRESTDGSINSYSSEGNLIFPGVRLGADSQFSDFLDGLGPAQLVGRQTLATPAMGDIQIGMEDKKGQLEVEVIRARSLTQKPGSKSTPAPYVKVYLLENGACIAKKKTRIARKTLDPLYQQSLVFDESPQGKVLQVIVWGDYGRMDHKCFMGVAQILLEELDLSSMVIGWYKLFPPSSLVDPTLTPLTRRASQSSLESSTGPPCIRS

SEQ ID NO: 11402 - protein, 826 aa, Homo Sapiens
MFAGFLQFLLLHTLHSGTGDLDYYWLDPATWHSRETSPISSHPVTWQPSKEGDRLIGRVILNKRTTMPKDSGALLGLKVVGGKMTDLGRLGAFITKVKKGSLADVVGHLRAGDEVLEWNGKPLPGATNEEVYNIILESKSEPQVEIIVSRPIGDIPRIPESSHPPLESSSSSFESQKMERPSISVISPTSPGALKDAPQVLPGQLSVKLWYDKVGHQLIVNVLQATDLPARVDGRPRNPYVKMYFLPDRSDKSKRRTKTVKKILEPKWNQTFVYSHVHRRDFRERMLEITVWDQPRVQEEESEFLGEILIELETALLDDEPHWYKLQTHDESSLPLPQPSPFMPRRHIHGESSSKKLQRSQRISDSDISDYEVDDGIGVVPPVGYRSSARESKSTTLTVPEQQRTTHHRSRSVSPHRGNDQGKPRSRLPNVPLQRSLDEIHPTRRSRSPTRHHDASRSPVDHRTRDVDSQYLSEQDSELLMLPRAKRGRSAECLHTTSELQPFLDRARSASTNCLRPDTSLHSPERERHSRKSERSSIQKQTRKGTASDAERMHRQRSPTQSPPADTSFSSRRGRQLPQVPVRSGSIEQESGHKKLKSTIQRSTETGMAAEMRKMVRQPSRESTDGSINSYSSEGNLIFPGVRLGADSQFSDFLDGLGPAQLVGRQTLATPAMGDIQIGMEDKKGQLEVEVIRARSLTQKPGSKSTPAPYVKVYLLENGACIAKKKTRIARKTLDPLYQQSLVFDESPQGKVLQVIVWGDYGRMDHKCFMGVAQILLEELDLSSMVIGWYKLFPPSSLVDPTLTPLTRRASQSSLESSTGPPCIRS

SEQ ID NO: 11403 - protein, 753 aa, Homo Sapiens
MPKDSGALLGLKVVGGKMTDLGRLGAFITKVKKGSLADVVGHLRAGDEVLEWNGKPLPGATNEEVYNIILESKSEPQVEIIVSRPIGDIPRIPESSHPPLESSSSSFESQKMERPSISVISPTSPGALKDAPQVLPGQLSVKLWYDKVGHQLIVNVLQATDLPARVDGRPRNPYVKMYFLPDRSDKSKRRTKTVKKILEPKWNQTFVYSHVHRRDFRERMLEITVWDQPRVQEEESEFLGEILIELETALLDDEPHWYKLQTHDESSLPLPQPSPFMPRRHIHGESSSKKLQRSQRISDSDISDYEVDDGIGVVPPVGYRSSARESKSTTLTVPEQQRTTHHRSRSVSPHRGNDQGKPRSRLPNVPLQRSLDEIHPTRRSRSPTRHHDASRSPVDHRTRDVDSQYLSEQDRMHRQRSPTQSPPADTSFSSRRGRQLPQVPVRSGSIEQASLVVEERTRQMKMKVHRFKQTTGSGSSQELDREQYSKYNIHKDQYRSCDNVSAKSSDSDVSDVSAISRTSSASRLSSTSFMSEQSERPRGRISSFTPKMQGRRMGTSGRSIMKSTSVSGEMYTLEHNDGSQSDTAVGTVGAGGKKRRSSLSAKVVAIVSRRSRSTSQLSQTESGHKKLKSTIQRSTETGMAAEMRKMVRQPSRESTDGSINSYSSEGNLIFPGVRLGADSQFSDFLDGLGPAQLVGRQTLATPAMGDIQIGMEDKKGQLEVEVIRARSLTQKPGSKSTPAPYVKVYLLENGACI

SEQ ID NO: 11404 - protein, 760 aa, Homo Sapiens
MPKDSGALLGLKVVGGKMTDLGRLGAFITKVKKGSLADVVGHLRAGDEVLEWNGKPLPGATNEEVYNIILESKSEPQVEIIVSRPIGDIPRIPESSHPPLESSSSSFESQKMERPSISVISPTSPGALKDAPQVLPGQLSVKLWYDKVGHQLIVNVLQATDLPARVDGRPRNPYVKMYFLPDRSDKSKRRTKTVKKILEPKWNQTFVYSHVHRRDFRERMLEITVWDQPRVQEEESEFLGEILIELETALLDDEPHWYKLQTHDESSLPLPQPSPFMPRRHIHGESSSKKLQRSQRISDSDISDYEVDDGIGVVPPVGYRSSARESKSTTLTVPEQQRTTHHRSRSVSPHRGNDQGKPRSRLPNVPLQRSLDEIHPTRRSRSPTRHHDASRSPVDHRTRDVDSQYLSEQDSELLMLPRAKRGRSAECLHTTSELQPFLDRARSASTNCLRPDTSLHSPERERHSRKSERSSIQKQTRKGTASDAERMHRQRSPTQSPPADTSFSSRRGRQLPQVPVRSGSIEQESGHKKLKSTIQRSTETGMAAEMRKMVRQPSRESTDGSINSYSSEGNLIFPGVRLGADSQFSDFLDGLGPAQLVGRQTLATPAMGDIQIGMEDKKGQLEVEVIRARSLTQKPGSKSTPAPYVKVYLLENGACIAKKKTRIARKTLDPLYQQSLVFDESPQGKVLQVIVWGDYGRMDHKCFMGVAQILLEELDLSSMVIGWYKLFPPSSLVDPTLTPLTRRASQSSLESSTGPPCIRS

SEQ ID NO: 11405 - protein, 1541 aa, Homo Sapiens
MSSAVGPRGPRPPTVPPPMQELPDLSHLTEEERNIIMAVMDRQKEEEEKEEAMLKCVVRDMAKPAACKTPRNAENQPHQPSPRLHQQFESYKEQVRKIGEEARRYQGEHKDDAPTCGICHKTKFADGCGHLCSYCRTKFCARCGGRVSLRSNNEDKVVMWVCNLCRKQQEILTKSGAWFFGSGPQQTSQDGTLSDTATGAGSEVPREKKARLQERSRSQTPLSTAAASSQDAAPPSAPPDRSKGAEPSQQALGPEQKQASSRSRSEPPRERKKTPGLSEQNGKGALKSERKRVPKTSAQPVEGAVEERERKERRESRRLEKGRSQDYPDTPEKRDEGKAADEEKQRKEEDYQTRYRSDPNLARYPVKPPPEEQQMRMHARVSRARHERRHSDVALPRTEAGAALPEGKAGKRAPAAARASPPDSPRAYSAERTAETRAPGAKQLTNHSPPAPRHGPVPAEAPELKAQEPLRKQSRLDPSSAVLMRKAKREKVETMLRNDSLSSDQSESVRPSPPKPHRSKRGGKKRQMSVSSSEEEGVSTPEYTSCEDVELESESVSEKGDLDYYWLDPATWHSRETSPISSHPVTWQPSKEGDRLIGRVILNKRTTMPKDSGALLGLKVVGGKMTDLGRLGAFITKVKKGSLADVVGHLRAGDEVLEWNGKPLPGATNEEVYNIILESKSEPQVEIIVSRPIGDIPRIPESSHPPLESSSSSFESQKMERPSISVISPTSPGALKDAPQVLPGQLSVKLWYDKVGHQLIVNVLQATDLPARVDGRPRNPYVKMYFLPDRSDKSKRRTKTVKKILEPKWNQTFVYSHVHRRDFRERMLEITVWDQPRVQEEESEFLGEILIELETALLDDEPHWYKLQTHDESSLPLPQPSPFMPRRHIHGESSSKKLQRSQRISDSDISDYEVDDGIGVVPPVGYRSSARESKSTTLTVPEQQRTTHHRSRSVSPHRGNDQGKPRSRLPNVPLQRSLDEIHPTRRSRSPTRHHDASRSPVDHRTRDVDSQYLSEQDSELLMLPRAKRGRSAECLHTTRHLVRHYKTLPPKMPLLQSSSHWNIYSELQPFLDRARSASTNCLRPDTSLHSPERERMHRQRSPTQSPPADTSFSSRRGRQLPQVPVRSGSIEQASLVVEERTRQMKMKVHRFKQTTGSGSSQELDREQYSKYNIHKDQYRSCDNVSAKSSDSDVSDVSAISRTSSASRLSSTSFMSEQSERPRGRISSFTPKMQGRRMGTSGRSIMKSTSVSGEMYTLEHNDGSQSDTAVGTVGAGGKKRRSSLSAKVVAIVSRRSRSTSQLSQTESGHKKLKSTIQRSTETGMAAEMRKMVRQPSRESTDGSINSYSSEGNLIFPGVRLGADSQFSDFLDGLGPAQLVGRQTLATPAMGDIQIGMEDKKGQLEVEVIRARSLTQKPGSKSTPAPYVKVYLLENGACIAKKKTRIARKTLDPLYQQSLVFDESPQGKVLQVIVWGDYGRMDHKCFMGVAQILLEELDLSSMVIGWYKLFPPSSLVDPTLTPLTRRASQSSLESSTGPPCIRS

SEQ ID NO: 11406 - protein, 1291 aa, Homo Sapiens
MSSAVGPRGPRPPTVPPPMQELPDLSHLTEEERNIIMAVMDRQKEEEEKEEAMLKCVVRDMAKPAACKTPRNAENQPHQPSPRLHQQFESYKEQVRKIGEEARRYQGEHKDDAPTCGICHKTKFADGCGHLCSYCRTKFCARCGGRVSLRSNNEDKVVMWVCNLCRKQQEILTKSGAWFFGSGPQQTSQDGTLSDTATGAGSEVPREKKARLQERSRSQTPLSTAAASSQDAAPPSAPPDRSKGAEPSQQALGPEQKQASSRSRSEPPRERKKTPGLSEQNGKGALKSERKRVPKTSAQPVEGAVEERERKERRESRRLEKGRSQDYPDTPEKRDEGKAADEEKQRKEEDYQTRYRSDPNLARYPVKPPPEEQQMRMHARVSRARHERRHSDVALPRTEAGAALPEGKAGKRAPAAARASPPDSPRAYSAERTAETRAPGAKQLTNHSPPAPRHGPVPAEAPELKAQEPLRKQSRLDPSSAVLMRKAKREKVETMLRNDSLSSDQSESVRPSPPKPHRSKRGGKKRQMSVSSSEEEGVSTPEYTSCEDVELESESVSEKGDLDYYWLDPATWHSRETSPISSHPVTWQPSKEGDRLIGRVILNKRTTMPKDSGALLGLKVVGGKMTDLGRLGAFITKVKKGSLADVVGHLRAGDEVLEWNGKPLPGATNEEVYNIILESKSEPQVEIIVSRPIGDIPRIPESSHPPLESSSSSFESQKMERPSISVISPTSPGALKDAPQVLPGQLSVKLWYDKVGHQLIVNVLQATDLPARVDGRPRNPYVKMYFLPDRSDKSKRRTKTVKKILEPKWNQTFVYSHVHRRDFRERMLEITVWDQPRVQEEESEFLGEILIELETALLDDEPHWYKLQTHDESSLPLPQPSPFMPRRHIHGESSSKKLQRSQRISDSDISDYEVDDGIGVVPPGYRSSARESKSTTLTVPEQQRTTHHRSRSVSPHRGNDQGKPRSRLPNVPLQRSLDEIHPTRRSRSPTRHHDASRSPVDHRTRDVDSQYLSEQDRMHRQRSPTQSPPADTSFSSRRGRQLPQVPVRSGSIEQESGHKKLKSTIQRSTETGMAAEMRKMVRQPSRESTDGSINSYSSEGNLIFPGVRLGADSQFSDFLDGLGPAQLVGRQTLATPAMGDIQIGMEDKKGQLEVEVIRARSLTQKPGSKSTPAPYVKVYLLENGACIAKKKTRIARKTLDPLYQQSLVFDESPQGKVLQVIVWGDYGRMDHKCFMGVAQILLEELDLSSMVIGWYKLFPPSSLVDPTLTPLTRRASQSSLESSTGPPCIRS

SEQ ID NO: 11407 - protein, 1342 aa, Homo Sapiens
MSSAVGPRGPRPPTVPPPMQELPDLSHLTEEERNIIMAVMDRQKEEEEKEEAMLKCVVRDMAKPAACKTPRNAENQPHQPSPRLHQQFESYKEQVRKIGEEARRYQGEHKDDAPTCGICHKTKFADGCGHLCSYCRTKFCARCGGRVSLRSNNEDKVVMWVCNLCRKQQEILTKSGAWFFGSGPQQTSQDGTLSDTATGAGSEVPREKKARLQERSRSQTPLSTAAASSQDAAPPSAPPDRSKGAEPSQQALGPEQKQASSRSRSEPPRERKKTPGLSEQNGKGALKSERKRVPKTSAQPVEGAVEERERKERRESRRLEKGRSQDYPDTPEKRDEGKAADEEKQRKEEDYQTRYRSDPNLARYPVKPPPEEQQMRMHARVSRARHERRHSDVALPRTEAGAALPEGKAGKRAPAAARASPPDSPRAYSAERTAETRAPGAKQLTNHSPPAPRHGPVPAEAPELKAQEPLRKQSRLDPSSAVLMRKAKREKVETMLRNDSLSSDQSESVRPSPPKPHRSKRGGKKRQMSVSSSEEEGVSTPEYTSCEDVELESESVSEKGDLDYYWLDPATWHSRETSPISSHPVTWQPSKEGDRLIGRVILNKRTTMPKDSGALLGLKVVGGKMTDLGRLGAFITKVKKGSLADVVGHLRAGDEVLEWNGKPLPGATNEEVYNIILESKSEPQVEIIVSRPIGDIPRIPESSHPPLESSSSSFESQKMERPSISVISPTSPGALKDAPQVLPGQLSVKLWYDKVGHQLIVNVLQATDLPARVDGRPRNPYVKMYFLPDRSDKSKRRTKTVKKILEPKWNQTFVYSHVHRRDFRERMLEITVWDQPRVQEEESEFLGEILIELETALLDDEPHWYKLQTHDESSLPLPQPSPFMPRRHIHGESSSKKLQRSQRISDSDISDYEVDDGIGVVPPGYRSSARESKSTTLTVPEQQRTTHHRSRSVSPHRGNDQGKPRSRLPNVPLQRSLDEIHPTRRSRSPTRHHDASRSPVDHRTRDVDSQYLSEQDSELLMLPRAKRGRSAECLHTTSELQPFLDRARSASTNCLRPDTSLHSPERERMHRQRSPTQSPPADTSFSSRRGRQLPQVPVRSGSIEQESGHKKLKSTIQRSTETGMAAEMRKMVRQPSRESTDGSINSYSSEGNLIFPGVRLGADSQFSDFLDGLGPAQLVGRQTLATPAMGDIQIGMEDKKGQLEVEVIRARSLTQKPGSKSTPAPYVKVYLLENGACIAKKKTRIARKTLDPLYQQSLVFDESPQGKVLQVIVWGDYGRMDHKCFMGVAQILLEELDLSSMVIGWYKLFPPSSLVDPTLTPLTRRASQSSLESSTGPPCIRS

SEQ ID NO: 11408 - protein, 1371 aa, Homo Sapiens
MSSAVGPRGPRPPTVPPPMQELPDLSHLTEEERNIIMAVMDRQKEEEEKEEAMLKCVVRDMAKPAACKTPRNAENQPHQPSPRLHQQFESYKEQVRKIGEEARRYQGEHKDDAPTCGICHKTKFADGCGHLCSYCRTKFCARCGGRVSLRSNNEDKVVMWVCNLCRKQQEILTKSGAWFFGSGPQQTSQDGTLSDTATGAGSEVPREKKARLQERSRSQTPLSTAAASSQDAAPPSAPPDRSKGAEPSQQALGPEQKQASSRSRSEPPRERKKTPGLSEQNGKGALKSERKRVPKTSAQPVEGAVEERERKERRESRRLEKGRSQDYPDTPEKRDEGKAADEEKQRKEEDYQTRYRSDPNLARYPVKPPPEEQQMRMHARVSRARHERRHSDVALPRTEAGAALPEGKAGKRAPAAARASPPDSPRAYSAERTAETRAPGAKQLTNHSPPAPRHGPVPAEAPELKAQEPLRKQSRLDPSSAVLMRKAKREKVETMLRNDSLSSDQSESVRPSPPKPHRSKRGGKKRQMSVSSSEEEGVSTPEYTSCEDVELESESVSEKGDLDYYWLDPATWHSRETSPISSHPVTWQPSKEGDRLIGRVILNKRTTMPKDSGALLGLKVVGGKMTDLGRLGAFITKVKKGSLADVVGHLRAGDEVLEWNGKPLPGATNEEVYNIILESKSEPQVEIIVSRPIGDIPRIPESSHPPLESSSSSFESQKMERPSISVISPTSPGALKDAPQVLPGQLSVKLWYDKVGHQLIVNVLQATDLPARVDGRPRNPYVKMYFLPDRSDKSKRRTKTVKKILEPKWNQTFVYSHVHRRDFRERMLEITVWDQPRVQEEESEFLGEILIELETALLDDEPHWYKLQTHDESSLPLPQPSPFMPRRHIHGESSSKKLQRSQRISDSDISDYEVDDGIGVVPPVGYRSSARESKSTTLTVPEQQRTTHHRSRSVSPHRGNDQGKPRSRLPNVPLQRSLDEIHPTRRSRSPTRHHDASRSPVDHRTRDVDSQYLSEQDSELLMLPRAKRGRSAECLHTTSELQPFLDRARSASTNCLRPDTSLHSPERERGRWSPSLDRRRPPSPRIQIQHASPENDRMHRQRSPTQSPPADTSFSSRRGRQLPQVPVRSGSIEQESGHKKLKSTIQRSTETGMAAEMRKMVRQPSRESTDGSINSYSSEGNLIFPGVRLGADSQFSDFLDGLGPAQLVGRQTLATPAMGDIQIGMEDKKGQLEVEVIRARSLTQKPGSKSTPAPYVKVYLLENGACIAKKKTRIARKTLDPLYQQSLVFDESPQGKVLQVIVWGDYGRMDHKCFMGVAQILLEELDLSSMVIGWYKLFPPSSLVDPTLTPLTRRASQSSLESSTGPPCIRS

SEQ ID NO: 11409 - protein, 1692 aa, Homo Sapiens
MSSAVGPRGPRPPTVPPPMQELPDLSHLTEEERNIIMAVMDRQKEEEEKEEAMLKCVVRDMAKPAACKTPRNAENQPHQPSPRLHQQFESYKEQVRKIGEEARRYQGEHKDDAPTCGICHKTKFADGCGHLCSYCRTKFCARCGGRVSLRSNNEDKVVMWVCNLCRKQQEILTKSGAWFFGSGPQQTSQDGTLSDTATGAGSEVPREKKARLQERSRSQTPLSTAAASSQDAAPPSAPPDRSKGAEPSQQALGPEQKQASSRSRSEPPRERKKTPGLSEQNGKGALKSERKRVPKTSAQPVEGAVEERERKERRESRRLEKGRSQDYPDTPEKRDEGKAADEEKQRKEEDYQTRYRSDPNLARYPVKPPPEEQQMRMHARVSRARHERRHSDVALPRTEAGAALPEGKAGKRAPAAARASPPDSPRAYSAERTAETRAPGAKQLTNHSPPAPRHGPVPAEAPELKAQEPLRKQSRLDPSSAVLMRKAKREKVETMLRNDSLSSDQSESVRPSPPKPHRSKRGGKKRQMSVSSSEEEGVSTPEYTSCEDVELESESVSEKGDLDYYWLDPATWHSRETSPISSHPVTWQPSKEGDRLIGRVILNKRTTMPKDSGALLGLKVVGGKMTDLGRLGAFITKVKKGSLADVVGHLRAGDEVLEWNGKPLPGATNEEVYNIILESKSEPQVEIIVSRPIGDIPRIPESSHPPLESSSSSFESQKMERPSISVISPTSPGALKDAPQVLPGQLSVKLWYDKVGHQLIVNVLQATDLPARVDGRPRNPYVKMYFLPDRSDKSKRRTKTVKKILEPKWNQTFVYSHVHRRDFRERMLEITVWDQPRVQEEESEFLGEILIELETALLDDEPHWYKLQTHDESSLPLPQPSPFMPRRHIHGESSSKKLQRSQRISDSDISDYEVDDGIGVVPPVGYRSSARESKSTTLTVPEQQRTTHHRSRSVSPHRGNDQGKPRSRLPNVPLQRSLDEIHPTRRSRSPTRHHDASRSPVDHRTRDVDSQYLSEQDSELLMLPRAKRGRSAECLHTTRHLVRHYKTLPPKMPLLQSSSHWNIYSSILPAHTKTKSVTRQDISLHHECFNSTVLRFTDEILVSELQPFLDRARSASTNCLRPDTSLHSPERERGRWSPSLDRRRPPSPRIQIQHASPENDRHSRKSERSSIQKQTRKGTASDAERVLPTCLSRRGHAAPRATDQPVIRGKHPARSRSSEHSSIRTLCSMHHLVPGGSAPPSPLLTRMHRQRSPTQSPPADTSFSSRRGRQLPQVPVRSGSIEQASLVVEERTRQMKMKVHRFKQTTGSGSSQELDREQYSKYNIHKDQYRSCDNVSAKSSDSDVSDVSAISRTSSASRLSSTSFMSEQSERPRGRISSFTPKMQGRRMGTSGRSIMKSTSVSGEMYTLEHNDGSQSDTAVGTVGAGGKKRRSSLSAKVVAIVSRRSRSTSQLSQTESGHKKLKSTIQRSTETGMAAEMRKMVRQPSRESTDGSINSYSSEGNLIFPGVRLGADSQFSDFLDGLGPAQLVGRQTLATPAMGDIQIGMEDKKGQLEVEVIRARSLTQKPGSKSTPAPYVKVYLLENGACIAKKKTRIARKTLDPLYQQSLVFDESPQGKVLQVIVWGDYGRMDHKCFMGVAQILLEELDLSSMVIGWYKLFPPSSLVDPTLTPLTRRASQSSLESSTGPPCIRS

SEQ ID NO: 11410 - protein, 1481 aa, Homo Sapiens
MSSAVGPRGPRPPTVPPPMQELPDLSHLTEEERNIIMAVMDRQKEEEEKEEAMLKCVVRDMAKPAACKTPRNAENQPHQPSPRLHQQFESYKEQVRKIGEEARRYQGEHKDDAPTCGICHKTKFADGCGHLCSYCRTKFCARCGGRVSLRSNNEDKVVMWVCNLCRKQQEILTKSGAWFFGSGPQQTSQDGTLSDTATGAGSEVPREKKARLQERSRSQTPLSTAAASSQDAAPPSAPPDRSKGAEPSQQALGPEQKQASSRSRSEPPRERKKTPGLSEQNGKGALKSERKRVPKTSAQPVEGAVEERERKERRESRRLEKGRSQDYPDTPEKRDEGKAADEEKQRKEEDYQTRYRSDPNLARYPVKPPPEEQQMRMHARVSRARHERRHSDVALPRTEAGAALPEGKAGKRAPAAARASPPDSPRAYSAERTAETRAPGAKQLTNHSPPAPRHGPVPAEAPELKAQEPLRKQSRLDPSSAVLMRKAKREKVETMLRNDSLSSDQSESVRPSPPKPHRSKRGGKKRQMSVSSSEEEGVSTPEYTSCEDVELESESVSEKGDLDYYWLDPATWHSRETSPISSHPVTWQPSKEGDRLIGRVILNKRTTMPKDSGALLGLKVVGGKMTDLGRLGAFITKVKKGSLADVVGHLRAGDEVLEWNGKPLPGATNEEVYNIILESKSEPQVEIIVSRPIGDIPRIPESSHPPLESSSSSFESQKMERPSISVISPTSPGALKDAPQVLPGQLSVKLWYDKVGHQLIVNVLQATDLPARVDGRPRNPYVKMYFLPDRSDKSKRRTKTVKKILEPKWNQTFVYSHVHRRDFRERMLEITVWDQPRVQEEESEFLGEILIELETALLDDEPHWYKLQTHDESSLPLPQPSPFMPRRHIHGESSSKKLQRSQRISDSDISDYEVDDGIGVVPPVGYRSSARESKSTTLTVPEQQRTTHHRSRSVSPHRGNDQGKPRSRLPNVPLQRSLDEIHPTRRSRSPTRHHDASRSPVDHRTRDVDSQYLSEQDSELLMLPRAKRGRSAECLHTTSELQPFLDRARSASTNCLRPDTSLHSPERERMHRQRSPTQSPPADTSFSSRRGRQLPQVPVRSGSIEQASLVVEERTRQMKMKVHRFKQTTGSGSSQELDREQYSKYNIHKDQYRSCDNVSAKSSDSDVSDVSAISRTSSASRLSSTSFMSEQSERPRGRISSFTPKMQGRRMGTSGRSIMKSTSVSGEMYTLEHNDGSQSDTAVGTVGAGGKKRRSSLSAKVVAIVSRRSRSTSQLSQTESGHKKLKSTIQRSTETGMAAEMRKMVRQPSRESTDGSINSYSSEGNLIFPGVRLGADSQFSDFLDGLGPAQLVGRQTLATPAMAPYVKVYLLENGACIAKKKTRIARKTLDPLYQQSLVFDESPQGKVLQVIVWGDYGRMDHKCFMGVAQILLEELDLSSMVIGWYKLFPPSSLVDPTLTPLTRRASQSSLESSTGPPCIRS

SEQ ID NO: 11411 - protein, 1475 aa, Homo Sapiens
MSSAVGPRGPRPPTVPPPMQELPDLSHLTEEERNIIMAVMDRQKEEEEKEEAMLKCVVRDMAKPAACKTPRNAENQPHQPSPRLHQQFESYKEQVRKIGEEARRYQGEHKDDAPTCGICHKTKFADGCGHLCSYCRTKFCARCGGRVSLRSNNEDKVVMWVCNLCRKQQEILTKSGAWFFGSGPQQTSQDGTLSDTATGAGSEVPREKKARLQERSRSQTPLSTAAASSQDAAPPSAPPDRSKGAEPSQQALGPEQKQASSRSRSEPPRERKKTPGLSEQNGKGALKSERKRVPKTSAQPVEGAVEERERKERRESRRLEKGRSQDYPDTPEKRDEGKAADEEKQRKEEDYQTRYRSDPNLARYPVKPPPEEQQMRMHARVSRARHERRHSDVALPRTEAGAALPEGKAGKRAPAAARASPPDSPRAYSAERTAETRAPGAKQLTNHSPPAPRHGPVPAEAPELKAQEPLRKQSRLDPSSAVLMRKAKREKVETMLRNDSLSSDQSESVRPSPPKPHRSKRGGKKRQMSVSSSEEEGVSTPEYTSCEDVELESESVSEKGDLDYYWLDPATWHSRETSPISSHPVTWQPSKEGDRLIGRVILNKRTTMPKDSGALLGLKVVGGKMTDLGRLGAFITKVKKGSLADVVGHLRAGDEVLEWNGKPLPGATNEEVYNIILESKSEPQVEIIVSRPIGDIPRIPESSHPPLESSSSSFESQKMERPSISVISPTSPGALKDAPQVLPGQLSVKLWYDKVGHQLIVNVLQATDLPARVDGRPRNPYVKMYFLPDRSDKSKRRTKTVKKILEPKWNQTFVYSHVHRRDFRERMLEITVWDQPRVQEEESEFLGEILIELETALLDDEPHWYKLQTHDESSLPLPQPSPFMPRRHIHGESSSKKLQRSQRISDSDISDYEVDDGIGVVPPGYRSSARESKSTTLTVPEQQRTTHHRSRSVSPHRGNDQGKPRSRLPNVPLQRSLDEIHPTRRSRSPTRHHDASRSPVDHRTRDVDSQYLSEQDSELLMLPRAKRGRSAECLHTTRMHRQRSPTQSPPADTSFSSRRGRQLPQVPVRSGSIEQASLVVEERTRQMKMKVHRFKQTTGSGSSQELDREQYSKYNIHKDQYRSCDNVSAKSSDSDVSDVSAISRTSSASRLSSTSFMSEQSERPRGRIRRMGTSGRSIMKSTSVSGEMYTLEHNDGSQSDTAVGTVGAGGKKRRSSLSAKVVAIVSRRSRSTSQLSQTESGHKKLKSTIQRSTETGMAAEMRKMVRQPSRESTDGSINSYSSEGNLIFPGVRLGADSQFSDFLDGLGPAQLVGRQTLATPAMGDIQIGMEDKKGQLEVEVIRARSLTQKPGSKSTPAPYVKVYLLENGACIAKKKTRIARKTLDPLYQQSLVFDESPQGKVLQVIVWGDYGRMDHKCFMGVAQILLEELDLSSMVIGWYKLFPPSSLVDPTLTPLTRRASQSSLESSTGPPCIRS

SEQ ID NO: 11412 - protein, 740 aa, Homo Sapiens
RPRNPYVKMYFLPDRSDKSKRRTKTVKKILEPKWNQTFVYSHVHRRDFRERMLEITVWDQPRVQEEESEFLGEILIELETALLDDEPHWYKLQTHDESSLPLPQPSPFMPRRHIHGESSSKKLQRSQRISDSDISDYEVDDGIGVVPPVGYRSSARESKSTTLTVPEQQRTTHHRSRSVSPHRGNDQGKPRSRLPNVPLQRSLDEIHPTRRSRSPTRHHDASRSPVDHRTRDVDSQYLSEQDSELLMLPRAKRGRSAECLHTTSELQPFLDRARSASTNCLRPDTSLHSPERERMHRQRSPTQSPPADTSFSSRRGRQLPQVPVRSGSIEQASLVVEERTRQMKMKVHRFKQTTGSGSSQELDREQYSKYNIHKDQYRSCDNVSAKSSDSDVSDVSAISRTSSASRLSSTSFMSEQSERPRGRISSFTPKMQGRRMGTSGRSIMKSTSVSGEMYTLEHNDGSQSDTAVGTVGAGGKKRRSSLSAKVVAIVSRRSRSTSQLSQTESGHKKLKSTIQRSTETGMAAEMRKMVRQPSRESTDGSINSYSSEGNLIFPGVRLGADSQFSDFLDGLGPAQLVGRQTLATPAMGDIQIGMEDKKGQLEVEVIRARSLTQKPGSKSTPAPYVKVYLLENGACIAKKKTRIARKTLDPLYQQSLVFDESPQGKVLQVIVWGDYGRMDHKCFMGVAQILLEELDLSSMVIGWYKLFPPSSLVDPTLTPLTRRASQSSLESSTGPPCIRS

SEQ ID NO: 11413 - protein, 610 aa, Homo Sapiens
  misc_feature (1)..(1): Xaa can be any naturally occurring amino acid
XDYEVDDGIGVVPPVGYRSSARESKSTTLTVPEQQRTTHHRSRSVSPHRGNDQGKPRSRLPNVPLQRSLDEIHPTRRSRSPTRHHDASRSPVDHRTRDVDSQYLSEQDSELLMLPRAKRGRSAECLHTTRHSRKSERSSIQKQTRKGTASDAERMHRQRSPTQSPPADTSFSSRRGRQLPQVPVRSGSIEQEQEKYNSSTKASLVVEERTRQMKMKVHRFKQTTGSGSSQELDREQYSKYNIHKDQYRSCDNVSAKSSDSDVSDVSAISRTSSASRLSSTSFMSEQSERPRGRISSFTPKMQGRRMGTSGRSIMKSTSVSGEMYTLEHNDGSQSDTAVGTVGAGGKKRRSSLSAKVVAIVSRRSRSTSQLSQTESGHKKLKSTIQRSTETGMAAEMRKMVRQPSRESTDGSINSYSSEGNLIFPGVRLGADSQFSDFLDGLGPAQLVGRQTLATPAMGDIQIGMEDKKGQLEVEVIRARSLTQKPGSKSTPAPYVKVYLLENGACIAKKKTRIARKTLDPLYQQSLVFDESPQGKVLQVIVWGDYGRMDHKCFMGVAQILLEELDLSSMVIGWYKLFPPSSLVDPTLTPLTRRASQSSLESSTGPPCIRS

SEQ ID NO: 11414 - protein, 1038 aa, Homo Sapiens
  misc_feature (1)..(1): Xaa can be any naturally occurring amino acid
XYSAERTAETRAPGAKQLTNHSPPAPRHGPVPAEAPELKAQEPLRKQSRLDPSSAVLMRKAKREKVETMLRNDSLSSDQSESVRPSPPKPHRSKRGGKKRQMSVSSSEEEGVSTPEYTSCEDVELESESVSEKGDLDYYWLDPATWHSRETSPISSHPVTWQPSKEGDRLIGRVILNKRTTMPKDSGALLGLKVVGGKMTDLGRLGAFITKVKKGSLADVVGHLRAGDEVLEWNGKPLPGATNEEVYNIILESKSEPQVEIIVSRPIGDIPRIPESSHPPLESSSSSFESQKMERPSISVISPTSPGALKDAPQVLPGQLSVKLWYDKVGHQLIVNVLQATDLPARVDGRPRNPYVKMYFLPDRSDKSKRRTKTVKKILEPKWNQTFVYSHVHRRDFRERMLEITVWDQPRVQEEESEFLGEILIELETALLDDEPHWYKLQTHDESSLPLPQPSPFMPRRHIHGESSSKKLQRSQRISDSDISDYEVDDGIGVVPPVGYRSSARESKSTTLTVPEQQRTTHHRSRSVSPHRGNDQGKPRSRLPNVPLQRSLDEIHPTRRSRSPTRHHDASRSPVDHRTRDVDSQYLSEQDRMHRQRSPTQSPPADTSFSSRRGRQLPQVPVRSGSIEQASLVVEERTRQMKMKVHRFKQTTGSGSSQELDREQYSKYNIHKDQYRSCDNVSAKSSDSDVSDVSAISRTSSASRLSSTSFMSEQSERPRGRISSFTPKMQGRRMGTSGRSIMKSTSVSGEMYTLEHNDGSQSDTAVGTVGAGGKKRRSSLSAKVVAIVSRRSRSTSQLSQTESGHKKLKSTIQRSTETGMAAEMRKMVRQPSRESTDGSINSYSSEGNLIFPGVRLGADSQFSDFLDGLGPAQLVGRQTLATPAMGDIQIGMEDKKGQLEVEVIRARSLTQKPGSKSTPAPYVKVYLLENGACIAKKKTRIARKTLDPLYQQSLVFDESPQGKVLQVIVWGDYGRMDHKCFMGVAQILLEELDLSSMVIGWYKLFPPSSLVDPTLTPLTRRASQSSLESSTGPPCIRS

SEQ ID NO: 11415 - protein, 151 aa, Homo Sapiens
MDSAACAAAATPVPALALALAPDLAQAPLALPGLLSPSCLLSSGQEVNGSERGTCLWRPWLSSTNDSPRQMRKLVDLAAGGATAAEVTKAESKFHHPVRLFWPKSRSFDYLYSAGEILLQNFPVQATINLYEDSDSEEEEEDEEQEDEEEK

SEQ ID NO: 11416 - protein, 104 aa, Homo Sapiens
MDSAACAAAATPVPALALALAPDLAQAPLALPGLLSPSCLLSSGQEVNGSERLFWPKSRSFDYLYSAGEILLQNFPVQATINLYEDSDSEEEEEDEEQEDEEEK

SEQ ID NO: 11417 - protein, 185 aa, Homo Sapiens
MPRLFLFHLLEFCLLLNQFSRAVAAKWKDDVIKLCGRELVRAQIAICGMSTWSKRSLSQEDAPQTPRPVAEIVPSFINKDTETIIIMLEFIANLPPELKAALSERQPSLPELQQYVPALKDSNLSFEEFKKLIRNRQSEAADSNPSELKYLGLDTHSQKKRRPYVALFEKCCLIGCTKRSLAKYC

SEQ ID NO: 11418 - protein, 185 aa, Homo Sapiens
MPRLFFFHLLGVCLLLNQFSRAVADSWMEEVIKLCGRELVRAQIAICGMSTWSKRSLSQEDAPQTPRPVAEIVPSFINKDTETINMMSEFVANLPQELKLTLSEMQPALPQLQQHVPVLKDSSLLFEEFKKLIRNRQSEAADSSPSELKYLGLDTHSRKKRQLYSALANKCCHVGCTKRSLARFC

SEQ ID NO: 11419 - protein, 68 aa, Homo Sapiens
  misc_feature (1)..(1): Xaa can be any naturally occurring amino acid
XTWSKRSLSQEDAPQTPRPVAGDFIQTVSLGISPDGGKALRTGSCFTREFLGALSKLCHPSSTKIQKP

SEQ ID NO: 11420 - protein, 109 aa, Homo Sapiens
MARYMLLLLLAVWVLTGELWPGAEARAAPYGVRLCGREFIRAVIFTCGGSRWRRSDILAHEAMEKNIEAPRSKFTCSRLEKLDSCSVSPAPKCTRSSINKERYLPGCRC

SEQ ID NO: 11421 - protein, 142 aa, Homo Sapiens
MARYMLLLLLAVWVLTGELWPGAEARAAPYGVRLCGREFIRAVIFTCGGSRWRRSDILAHEAMGDTFPDADADEDSLAGELDEAMGSSEWLALTKSPQAFYRGRPSWQGTPGVLRGSRDVLAGLSSSCCKWGCSKSEISSLC

SEQ ID NO: 11422 - protein, 165 aa, Homo Sapiens
EEKKLLVYEALEYAKRALEKNESSFASHKWYAICLSDVGDYEGIKAKIANAYIIKEHFEKAIELNPKDATSIHLMGIWCYTFAEMPWYQRRIAKMLFATPPSSTYEKALGYFHRAEQGKTYLKLHNKKLAAFWLMKAKDYPAHTEEDKQIQTEAAQLLTSFSEKN

SEQ ID NO: 11423 - protein, 108 aa, Homo Sapiens
MALAARLWRLLPFRRGAAPGSRLPAGTSGSRGHCGPCRFRGFEVMGNPGTFKRGLLLSALSYLGFETYQVISQAAVVHATAKESRCVTEGRVWRCDLSSLQPLPPGFK

SEQ ID NO: 11424 - protein, 271 aa, Homo Sapiens
MALAARLWRLLPFRRGAAPGSRLPAGTSGSRGHCGPCRFRGFEVMGNPGTFKRGLLLSALSYLGFETYQVISQAAVVHATAKVEEILEQADYLYESGETEKLYQLLTQYKESEDAELLWRLARASRDVAQLSRTSEEEKKLLVYEALEYAKRALEKNESSFASHKKAIELNPKDATSIHLMGIWCYTFAEMPWYQRRIAKMLFATPPSSTYEKALGYFHRAEQGKTYLKLHNKKLAAFWLMKAKDYPAHTEEDKQIQTEAAQLLTSFSEKN

SEQ ID NO: 11425 - protein, 284 aa, Homo Sapiens
MALAARLWRLLPFRRGAAPGSRLPAGTSGSRGHCGPCRFRGFEVMGNPGTFKRGLLLSALSYLGFETYQVISQAAVVHATAKVEEILEQADYLYESGETEKLYQLLTQYKESEDAELLWRLARASRDVAQLSRTSEEEKKLLVYEALEYAKRALEKNESSFASHKKAIELNPKDATSIHLMGIWCYTFAEMPWYQRRIAKMLFATPPSSTYEKALGYFHRAEQVDPNFYSKNLLLLGKTYLKLHNKKLAAFWLMKAKDYPAHTEEDKQIQTEAAQLLTSFSEKN

SEQ ID NO: 11426 - protein, 314 aa, Homo Sapiens
MALAARLWRLLPFRRGAAPGSRLPAGTSGSRGHCGPCRFRGFEVMGNPGTFKRGLLLSALSYLGFETYQVISQAAVVHATAKVEEILEQADYLYESGETEKLYQLLTQYKESEDAELLWRLARASRDVAQLSRTSEEEKKLLVYEALEYAKRALEKNESSFASHKWYAICLSDVGDYEGIKAKIANAYIIKEHFEKAIELNPKDATSIHLMGIWCYTFAEMPWYQRRIAKMLFATPPSSTYEKALGYFHRAEQVDPNFYSKNLLLLGKTYLKLHNKKLAAFWLMKAKDYPAHTEEDKQIQTEAAQLLTSFSEKN

SEQ ID NO: 11427 - protein, 64 aa, Homo Sapiens
MGNPGTFKRGLLLSALSYLGFETYQVISQAAVVHATAKESRCVTEGRVWRCDLSSLQPLPPGFK

SEQ ID NO: 11428 - protein, 95 aa, Homo Sapiens
MGNPGTFKRGLLLSALSYLGFETYQVISQAAVVHATAKVEEILEQADYLYESGETEKLYQLLTQYKESEDAELLWRLARASRDVAQLSRTSEEEK

SEQ ID NO: 11429 - protein, 248 aa, Homo Sapiens
MGNPGTFKRGLLLSALSYLGFETYQVISQAAVVHATAKVEEILEQADYLYESGETEKLYQLLTQYKESEDAELLWRLARASRDVAQLSRTSEEEKKLLVYEALEYAKRALEKNESSFASHKWYAICLSDVGDYEGIKAKIANAYIIKEHFEKAIELNPKDATSIHLMGIWCYTFAEMPWYQRRIAKMLFATPPSSTYEKALGYFHRAEQGKTYLKLHNKKLAAFWLMKAKDYPAHTEEDKQVKRNRSS

SEQ ID NO: 11430 - protein, 42 aa, Homo Sapiens
MGNPGTFKRGLLLSALSYLGFETYQVISQAAVVHATAKVRQY

SEQ ID NO: 11431 - protein, 159 aa, Homo Sapiens
  misc_feature (1)..(1): Xaa can be any naturally occurring amino acid
XCYTFAEMPWYQRRIAKMLFATPPSSTYEKALGYFHRAEQVDPNFYSKNLLLLGKTYLKLHNKKLAAFWLMKAKDYPAHTEEDKQEPDSPRVTLVRDVSPLRVRPITENKPQESLTFSFPCSPHLIVLVWIPELTAGLRCLFPHVHVYQRFCVASPSAS

SEQ ID NO: 11432 - protein, 107 aa, Homo Sapiens
  misc_feature (1)..(1): Xaa can be any naturally occurring amino acid
XKAIELNPKDATSIHLMGIWCYTFAEMPWYQRRIAKMLFATPPSSTYEKALGYFHRAEQVDPNFYSKNLLLLGKTYLKLHNKKLAAFWLMKAKDYPAHTEEDKQEII

SEQ ID NO: 11433 - protein, 151 aa, Homo Sapiens
  misc_feature (1)..(1): Xaa can be any naturally occurring amino acid
XKNESSFASHKWYAICLSDVGDYEGIKAKIANAYIIKEHFEKAIELNPKDATSIHLMGIWCYTFAEMPWYQRRIAKMLFATPPSSTYEKALGYFHRAEQVDPNFYSKNLLLLGKTYLKLHNKKLAAFWLMKAKDYPAHTEEDKQVKRNRSS

SEQ ID NO: 11434 - protein, 130 aa, Homo Sapiens
  misc_feature (1)..(1): Xaa can be any naturally occurring amino acid
XKTYLKLHNKKLAAFWLMKAKDYPAHTEEDKQEPDSPRVTLVRDVSPLRVRPITENKPQESLTFSFPCSPHLIVLVWIPELTAGLRCLFPHVHVYQSLKITRVFIIRIWKRSLFNQADLCLSFVFTMNSE

SEQ ID NO: 11435 - protein, 225 aa, Homo Sapiens
  misc_feature (1)..(1): Xaa can be any naturally occurring amino acid
XLLSALSYLGFETYQVISQAAVVHATAKVEEILEQADYLYESGETEKLYQLLTQYKESEDAELLWRLARASRDVAQLSRTSEEEKKLLVYEALEYAKRALEKNESSFASHKWYAICLSDVGDYEGIKAKIANAYIIKEHFEKAIELNPKDATSIHLMGIWCYTFAEMPWYQRRIAKMLFATPPSSTYEKALGYFHRAEQGEEKQKQLKGQEVGLSRDVAFCWMAF

SEQ ID NO: 11436 - protein, 156 aa, Homo Sapiens
MALEKSLVRLLLLVLILLVLGWVQPSLGKESRAKKFQRQHMDSDSSPSSSSTYCNQMMRRRNMTQGRCKPVNTFVHEPLVDVQNVCFQEKVTCKNGQGNCYKSNSSMHITDCRLTNGSRYPNCAYRTSPKERHIIVACEGSPYVPVHFDASVEDST

SEQ ID NO: 11437 - protein, 156 aa, Homo Sapiens; identical to SEQ ID NO: 11436

SEQ ID NO: 11438 - protein, 156 aa, Homo Sapiens; identical to SEQ ID NO: 11436

SEQ ID NO: 11439 - protein, 156 aa, Homo Sapiens; identical to SEQ ID NO: 11436

SEQ ID NO: 11440 - protein, 116 aa, Homo Sapiens
MDSDSSPSSSSTYCNQMMRRRNMTQGRCKPVNTFVHEPLVDVQNVCFQEKVTCKNGQGNCYKSNSSMHITDCRLTNGSRYPNCAYRTSPKERHIIVACEGSPYVPVHFDASVEDST

SEQ ID NO: 11441 - protein, 216 aa, Homo Sapiens
MKLNLVQIFFMLLMLLLGLGMGLGLGLHMATAVLEESDQPLNEFWSSDSQDKAEATEEGDGTQTTETLVLSNKEVVQPGWPEDPILGEDEVGGNKMLRASALFQSNKDYLRLDQTDRECNDMMAHKMKEPSQSCIAQYAFIHEDLNTVKAVCNSPVIACELKGGKCHKSSRPFDLTLCELSQPDQVTPNCNYLTSVIKKHIIITCNDMKRQLPTGQ

SEQ ID NO: 11442 - protein, 244 aa, Homo Sapiens
MWGAPLPRRPVWDVRSASAGPQPCLGGKMKLNLVQIFFMLLMLLLGLGMGLGLGLHMATAVLEESDQPLNEFWSSDSQDKAEATEEGDGTQTTETLVLSNKEVVQPGWPEDPILGEDEVGGNKMLRASALFQSNKDYLRLDQTDRECNDMMAHKMKEPSQSCIAQYAFIHEDLNTVKAVCNSPVIACELKGGKCHKSSRPFDLTLCELSQPDQVTPNCNYLTSVIKKHIIITCNDMKRQLPTGQ

SEQ ID NO: 11443 - protein, 136 aa, Homo Sapiens
METFPLLLLSLGLVLAEASESTMKIIKEEFTDEEMQYDMAKSGQEKQTIEILMNPILLVKNTSLSMSKDDMSSTLLTFRSLHYNDPKGNSSGNDKECCNDMTVWRKVSEANGSCKWSNNFIRSSTEVMRRVHRAPS

SEQ ID NO: 11444 - protein, 143 aa, Homo Sapiens
METFPLLLLSLGLVLAEASESTMKIIKEEFTDEEMQYDMAKSGQEKQTIEILMNPILLVKNTSLSMSKDDMSSTLLTFRSLHYNDPKGNSSGNDKECCNDMTVWRKVSEANGSCKWSNNFIRSSTEVMRRVHRAPSCKFVQNP

SEQ ID NO: 11445 - protein, 171 aa, Homo Sapiens
METFPLLLLSLGLVLAEASESTMKIIKEEFTDEEMQYDMAKSGQEKQTIEILMNPILLVKNTSLSMSKDDMSSTLLTFRSLHYNDPKGNSSGNDKECCNDMTVWRKVSEANGSCKWSNNFIRSSTEVMRRVHRAPSCKFVQNPGISCCESLELENTVCQFTTGKQFPRCQY

SEQ ID NO: 11446 - protein, 178 aa, Homo Sapiens
METFPLLLLSLGLVLAEASESTMKIIKEEFTDEEMQYDMAKSGQEKQTIEILMNPILLVKNTSLSMSKDDMSSTLLTFRSLHYNDPKGNSSGNDKECCNDMTVWRKVSEANGSCKWSNNFIRSSTEVMRRVHRAPSCKFVQNPGISCCESLELENTVCQFTTGKQFPRCQYHSVTSLE

SEQ ID NO: 11447 - protein, 178 aa, Homo Sapiens; identical to SEQ ID NO: 11446

SEQ ID NO: 11448 - protein, 199 aa, Homo Sapiens
METFPLLLLSLGLVLAEASESTMKIIKEEFTDEEMQYDMAKSGQEKQTIEILMNPILLVKNTSLSMSKDDMSSTLLTFRSLHYNDPKGNSSGNDKECCNDMTVWRKVSEANGSCKWSNNFIRSSTEVMRRVHRAPSCKFVQNPGISCCESLELENTVCQFTTGKQFPRCQYHSVTSLEKILTVLTGHSLMSWLVCGSKL

SEQ ID NO: 11449 - protein, 199 aa, Homo Sapiens; identical to SEQ ID NO: 11448

SEQ ID NO: 11450 - protein, 199 aa, Homo Sapiens; identical to SEQ ID NO: 11448

SEQ ID NO: 11451 - protein, 199 aa, Homo Sapiens; identical to SEQ ID NO: 11448

SEQ ID NO: 11452 - protein, 199 aa, Homo Sapiens; identical to SEQ ID NO: 11448

SEQ ID NO: 11453 - protein, 199 aa, Homo Sapiens; identical to SEQ ID NO: 11448

SEQ ID NO: 11454 - protein, 147 aa, Homo Sapiens
MIIMVIIFLVLLFWENEVNDEAVMSTLEHLHVDYPQNDVPVPARYCNHMIIQRVIREPDHTCKKEHVFIHERPRKINGICISPKKVACQNLSAIFCFQSETKFKMTVCQLIEGTRYPACRYHYSPTEGFVLVTCDDLRPDSFLGYVK

SEQ ID NO: 11455 - protein, 156 aa, Homo Sapiens
MAPAVTRLLFLQLVLGPTLVMDIKMQIGSRNFYTLSIDYPRVNYPKGFRGYCNGLMSYMRGKMQNSDCPKIHYVIHAPWKAIQKFCKYSDSFCENYNEYCTLTQDSLPITVCSLSHQQPPTSCYYNSTLTNQKLYLLCSRKYEADPIGIAGLYSGI

SEQ ID NO: 11456 - protein, 161 aa, Homo Sapiens
MVPKLFTSQICLLLLLGLLAVEGSLHVKPPQFTWAQWFETQHINMTSQQCTNAMQVINNYQRRCKNQNTFLLTTFANVVNVCGNPNMTCPSNKTRKNCHHSGSQVPLIHCNLTTPSPQNISNCRYAQTPANMFYIVACDNRDQRRDPPQYPVVPVHLDRII

SEQ ID NO: 11457 - protein, 160 aa, Homo Sapiens
MVPKLFTSQICLLLLLGLMGVEGSLHARPPQFTRAQWFAIQHISLNPPRCTIAMRAINNYRWRCKNQNTFLRTTFANVVNVCGNQSIRCPHNRTLNNCHRSRFRVPLLHCDLINPGAQNISNCTYADRPGRRFYVVACDNRDPRDSPRYPVVPVHLDTTI

SEQ ID NO: 11458 - protein, 147 aa, Homo Sapiens
MALQRTHSLLLLLLLTLLGLGLVQPSYGQDGMYQRFLRQHVHPEETGGSDRYCNLMMQRRKMTLYHCKRFNTFIHEDIWNIRSICSTTNIQCKNGKMNCHEGVVKVTDCRDTGSSRAPNCRYRAIASTRRVVIACEGNPQVPVHFDG

SEQ ID NO: 11459 - protein, 147 aa, Homo Sapiens; identical to SEQ ID NO: 11458

SEQ ID NO: 11460 - protein, 147 aa, Homo Sapiens; identical to SEQ ID NO: 11458

SEQ ID NO: 11461 - protein, 150 aa, Homo Sapiens
MVLCFPLLLLLLVLWGPVCPLHAWPKRLTKAHWFEIQHIQPSPLQCNRAMSGINNYTQHCKHQNTFLHDSFQNVAAVCDLLSIVCKNRRHNCHQSSKPVNMTDCRLTSGKYPQCRYSAAAQYKFFIVACDPPQKSDPPYKLVPVHLDSIL

SEQ ID NO: 11462 - protein, 156 aa, Homo Sapiens
MAPARAGFCPLLLLLLLGLWVAEIPVSAKPKGMTSSQWFKIQHMQPSPQACNSAMKNINKHTKRCKDLNTFLHEPFSSVAATCQTPKIACKNGDKNCHQSHGAVSLTMCKLTSGKHPNCRYKEKRQNKSYVVACKPPQKKDSQQFHLVPVHLDRVL

SEQ ID NO: 11463 - protein, 156 aa, Homo Sapiens; identical to SEQ ID NO: 11462

SEQ ID NO: 11464 - protein, 154 aa, Homo Sapiens
MAPARAGCCPLLLLLLGLWVAEVLVRAKPKDMTSSQWFKTQHVQPSPQACNSAMSIINKYTERCKDLNTFLHEPFSSVAITCQTPNIACKNSCKNCHQSHGPMSLTMGELTSGKYPNCRYKEKHLNTPYIVACDPPQQGDPGYPLVPVHLDKVV

SEQ ID NO: 11465 - protein, 205 aa, Homo Sapiens
MMRTLITTHPLPLLLLPQQLLQLVQFQEVDTDFDFPEEDKKEEFEECLEKFFSTGPARPPTKEKVKRRVLIEPGMPLNHIEYCNHEIMGKNVYYKHRWVAEHYFLLMQYDELQKICYNRFVPCKNGIRKCNRSKGLVEGVYCNLTEAFEIPACKYESLYRKGYVLITCSWQNEMQKRIPHTINDLVEPPEHRSFLSEDGVFVISP

SEQ ID NO: 11466 - protein, 205 aa, Homo Sapiens; identical to SEQ ID NO: 11465

SEQ ID NO: 11467 - protein, 205 aa, Homo Sapiens; identical to SEQ ID NO: 11465

SEQ ID NO: 11468 - protein, 205 aa, Homo Sapiens; identical to SEQ ID NO: 11465

SEQ ID NO: 11469 - protein, 205 aa, Homo Sapiens; identical to SEQ ID NO: 11465

SEQ ID NO: 11470 - protein, 205 aa, Homo Sapiens; identical to SEQ ID NO: 11465

SEQ ID NO: 11471 - protein, 210 aa, Homo Sapiens
MSAGKMMRTLITTHPLPLLLLPQQLLQLVQFQEVDTDFDFPEEDKKEEFEECLEKFFSTGPARPPTKEKVKRRVLIEPGMPLNHIEYCNHEIMGKNVYYKHRWVAEHYFLLMQYDELQKICYNRFVPCKNGIRKCNRSKGLVEGVYCNLTEAFEIPACKYESLYRKGYVLITCSWQNEMQKRIPHTINDLVEPPEHRSFLSEDGVFVISP

SEQ ID NO: 11472 - protein, 210 aa, Homo Sapiens; identical to SEQ ID NO: 11471

SEQ ID NO: 11473 - protein, 210 aa, Homo Sapiens; identical to SEQ ID NO: 11471

SEQ ID NO: 11474 - protein, 210 aa, Homo Sapiens; identical to SEQ ID NO: 11471

SEQ ID NO: 11475 - protein, 210 aa, Homo Sapiens; identical to SEQ ID NO: 11471

SEQ ID NO: 11476 - protein, 43 aa, Homo Sapiens
MSWLLFLAHRVALAALPCRRGSRGFGMFYAVRRGRKTGVFLTC

SEQ ID NO: 11477 - protein, 43 aa, Homo Sapiens
MSWLLFLAHRVALAALPCRRGSRGFGMFYAVRRGRKTGVFLTW

SEQ ID NO: 11478 - protein, 286 aa, Homo Sapiens
MSWLLFLAHRVALAALPCRRGSRGFGMFYAVRRGRKTGVFLTWNECRAQVDRFPAARFKKFATEDEAWAFVRKSASPEVSEGHENQHGQESEAKASKRLREPLDGDGHESAEPYAKHMKPSVEPAPPVSRDTFSYMGDFVVVYTDGCCSSNGRRRPRAGIGVYWGPGHPLNVGIRLPGRQTNQRAEIHAACKAIEQAKTQNINKLVLYTDSMFTINGITNWVQGWKKNGWKTSAGKEVINKEDFVALERLTQGMDIQWMHVPGHSGFIGNEEADRLAREGAKQSED

SEQ ID NO: 11479 - protein, 254 aa, Homo Sapiens
MRPAALRGALLGCLCLALLCLGGADKRLRDNHEWKKLIMVQHWPETVCEKIQNDCRDPPDYWTIHGLWPDKSEGCNRSWPFNLEEIKDLLPEMRAYWPDVIHSFPNRSRFWKHEWEKHGTCAAQVDALNSQKKYFGRSLELYRELDLNSVLLKLGIKPSINYYQVADFKDALARVYGVIPKIQCLPPSQDEEVQTIGQIELCLTKQDQQLQNCTEPGEQPSPKQEVWLANGAAESRGLRVCEDGPVFYPPPKKT

SEQ ID NO: 11480 - protein, 256 aa, Homo Sapiens
MRPAALRGALLGCLCLALLCLGGADKRLRDNHEWKKLIMVQHWPETVCEKIQNDCRDPPDYWTIHGLWPDKSEGCNRSWPFNLEEIKDLLPEMRAYWPDVIHSFPNRSRFWKHEWEKHGTCAAQVDALNSQKKYFGRSLELYRELDLNSVLLKLGIKPSINYYQVADFKDALARVYGVIPKIQCLPPSQDEEVQTIGQIELCLTKQDQQLQNCTEPGEQPSPKQEVWLANGAAESRGLRVCEDGPVFYPPPKKTKH

SEQ ID NO: 11481 - protein, 256 aa, Homo Sapiens; identical to SEQ ID NO: 11480

SEQ ID NO: 11482 - protein, 238 aa, Homo Sapiens
MRPAALRGALLGCLCLALLCLGGADKRLRDNHEWKKLIMVQHWPETVCEKIQNDCRDPPDYWTIHGLWPDKSEGCNRSWPFNLEEIKKNWMEITDSSLPSPSMGPAPPRWMRSTPRRSTLAEAWNSTGSWTSTGGCALPPAALPSGDLCCRPSLTAGSRGVGVDLTALQQLLHVHYSATGIIPEECSEPTKPFQIILHHDHTEWVQSIGMPIWTISSSESAIGKTRTQPACAVLSHDS

SEQ ID NO: 11483 - protein, 121 aa, Homo Sapiens
MRPAALRGALLGCLCLALLCLGGADKRLRDNHEWKKLIMVQHWPETVCEKIQNDCRDPPDYWTIHGLWPDKSEGCNRSWPFNLEEIKKNWMEITDSSLPSPSTLPIINIFYSVLHLLQLMN

SEQ ID NO: 11484 - protein, 306 aa, Homo Sapiens [sequence omitted]

SEQ ID NO: 11485 - protein, 71 aa, Homo Sapiens
MRPAALRGALLGCLCLALLCLGGADKRLRDNHEWKKLIMVQHWPETVCEKIQNDCRDPPDYWTIHGLWQAR

SEQ ID NO: 11486 - protein, 218 aa, Homo Sapiens
MVQHWPETVCEKIQNDCRDPPDYWTIHGLWPDKSEGCNRSWPFNLEEIKDLLPEMRAYWPDVIHSFPNRSRFWKHEWEKHGTCAAQVDALNSQKKYFGRSLELYRELDLNSVLLKLGIKPSINYYQVADFKDALARVYGVIPKIQCLPPSQDEEVQTIGQIELCLTKQDQQLQNCTEPGEQPSPKQEVWLANGAAESRGLRVCEDGPVFYPPPKKTKH

SEQ ID NO: 11487 - protein, 9 aa, Homo Sapiens
MAGCGEIDH

SEQ ID NO: 11488 - protein, 358 aa, Homo Sapiens
MAGCGEIDHSINMLPTNRKANESCSNTAPSLTVPECAICLQTCVHPVSLPCKHVFCYLCVKGASWLGKRCALCRQEIPEDFLDKPTLLSPEELKAASRGNGEYAWYYEGRNGWWQYDERTSRELEDAFSKGKKNTEMLIAGFLYVADLENMVQYRRNEHGRRRKIKRDIIDIPKKGVAGLRLDCDANTVNLARESSADGADSVSAQSGASVQPLVSSVRPLTSVDGQLTSPATPSPDASTSLEDSFAHLQLSGDNTAERSHRGEGEEDHESPSSGRVPAPDTSIEETESDASSDSEDVSAVVAQHSLTQQRLLVSNANQTVPDRSDRSGTDRSVAGGGTVSVSVRSRRPDGQCTVTEV

SEQ ID NO: 11489 - protein, 358 aa, Homo Sapiens; identical to SEQ ID NO: 11488

SEQ ID NO: 11490 - protein, 14 aa, Homo Sapiens
MCWGSSIFMLFSPL

SEQ ID NO: 11491 - protein, 42 aa, Homo Sapiens
MCWGSSIFMLFSPLVLYDCYLYEALVITKHFFCPFLPELCKL

SEQ ID NO: 11492 - protein, 42 aa, Homo Sapiens; identical to SEQ ID NO: 11491

SEQ ID NO: 11493 - protein, 42 aa, Homo Sapiens; identical to SEQ ID NO: 11491

SEQ ID NO: 11494 - protein, 40 aa, Homo Sapiens
MGSSIFMLFSPLVLYDCYLYEALVITKHFFCPFLPELCKL

SEQ ID NO: 11495 - protein, 40 aa, Homo Sapiens; identical to SEQ ID NO: 11494

SEQ ID NO: 11496 - protein, 359 aa, Homo Sapiens
MMAGCGEIDHSINMLPTNRKANESCSNTAPSLTVPECAICLQTCVHPVSLPCKHVFCYLCVKGASWLGKRCALCRQEIPEDFLDKPTLLSPEELKAASRGNGEYAWYYEGRNGWWQYDERTSRELEDAFSKGKKNTEMLIAGFLYVADLENMVQYRRNEHGRRRKIKRDIIDIPKKGVAGLRLDCDANTVNLARESSADGADSVSAQSGASVQPLVSSVRPLTSVDGQLTSPATPSPDASTSLEDSFAHLQLSGDNTAERSHRGEGEEDHESPSSGRVPAPDTSIEETESDASSDSEDVSAVVAQHSLTQQRLLVSNANQTVPDRSDRSGTDRSVAGGGTVSVSVRSRRPDGQCTVTEV

SEQ ID NO: 11497 - protein, 359 aa, Homo Sapiens; identical to SEQ ID NO: 11496

SEQ ID NO: 11498 - protein, 359 aa, Homo Sapiens; identical to SEQ ID NO: 11496

SEQ ID NO: 11499 - protein, 101 aa, Homo Sapiens
MSFLRITPSTHSSVSSGLLRLSIFLLLSFPDSNGKAIWTAHLNITFQGTENIVAVMISNLKGMEILHSIQKGVYVTVIIEVGRMHMQWEAKSNKDRCEESY

SEQ ID NO: 11500 - protein, 305 aa, Homo Sapiens
MSFLRITPSTHSSVSSGLLRLSIFLLLSFPDSNGKAIWTAHLNITFQVGNEITSELGESGVFGNHSPLERVSGVVALPEGWNQNACHPLTNFSRPKQADSWLALIERGGCTFTHKINVAAEKGANGVIIYNYQGTGSKVFPMSHQGTENIVAVMISNLKGMEILHSIQKGVYVTVIIEVGRMHMQWVSHYIMYLFTFLAATIAYFYLDCVWRLTPRVPNSFTRRRSQIKTDVKKAIDQLQLRVLKEGDEELDLNEDNCVVCFDTYKPQDVVRILTCKHFFHKACIDPWLLAHRTCPMCKCDILKT

SEQ ID NO: 11501 - protein, 396 aa, Homo Sapiens
MAMSLIQACCSLALSTWLLSFCFVHLLCLDFTVAEKEEWYTAFVNITYAEPAPDPGAGAAGGGGAELHTEKTECGRYGEHSPKQDARGEVVMASSAHDRLACDPNTKFAAPTRGKNWIALIPKGNCTYRDKIRNAFLQNASAVVIFNVGSNTNETITMPHAGVEDIVAIMIPEPKGKEIVSLLERNITVTMYITIGTRNLQKYRRLGDAAKKAISKLQIRTIKKGDKETESDFDNCAVCIEGYKPNDVVRILPCRHLFHKSCVDPWLLDHRTCPMCKMNILKALGIPPNADCMDDLPTDFEGSLGGPPTNQITGASDTTVNESSVTLDPAVRTVGALQVVQDTDPIPQEGDVIFTTNSEQEPAVSSDSDISLIMAMEVGLSDVELSTDQDCEEVKS

SEQ ID NO: 11502 - protein, 405 aa, Homo Sapiens
MAMSLIQACCSLALSTWLLSFCFVHLLCLDFTVAEKEEWYTAFVNITYAEPAPDPGAGAAGGGGAELHTEKTECGRYGEHSPKQDARGEVVMASSAHDRLACDPNTKFAAPTRGKNWIALIPKGNCTYRDKIRNAFLQNASAVVIFNVGSNTNETITMPHAGVEDIVAIMIPEPKGKEIVSLLERNITVTMYITIGTRNLQKYVSRTSVVFVSISFIVLMIISLAWLVFYYIQRFRYANARDRNQRRLGDAAKKAISKLQIRTIKKGDKETESDFDNCAVCIEGYKPNDVVRILPCRHLFHKSCVDPWLLDHRTCPMCKMNILKALGIPPNADCMDDLPTDFEGSLGGPPTNQITGASDTTVNESSVTLDPAVRTVGALQVVQDTDPIPQEGDVIFTTNSEFCHT

SEQ ID NO: 11503 - protein, 438 aa, Homo Sapiens
MAMSLIQACCSLALSTWLLSFCFVHLLCLDFTVAEKEEWYTAFVNITYAEPAPDPGAGAAGGGGAELHTEKTECGRYGEHSPKQDARGEVVMASSAHDRLACDPNTKFAAPTRGKNWIALIPKGNCTYRDKIRNAFLQNASAVVIFNVGSNTNETITMPHAGVEDIVAIMIPEPKGKEIVSLLERNITVTMYITIGTRNLQKYVSRTSVVFVSISFIVLMIISLAWLVFYYIQRFRYANARDRNQRRLGDAAKKAISKLQIRTIKKGDKETESDFDNCAVCIEGYKPNDVVRILPCRHLFHKSCVDPWLLDHRTCPMCKMNILKALGIPPNADCMDDLPTDFEGSLGGPPTNQITGASDTTVNESSVTLDPAVRTVGALQVVQDTDPIPQEGDVIFTTNSEQEPAVSSDSDISLIMAMEVGLSDVELSTDQDCEEVKS

SEQ ID NO: 11504 - protein, 230 aa, Homo Sapiens
MIPEPKGKEIVSLLERNITVTMYITIGTRNLQKYVSRTSVVFVSISFIVLMIISLAWLVFYYIQRFRYANARDRNQRRLGDAAKKAISKLQIRTIKKGDKETESDFDNCAVCIEGYKPNDVVRILPCRHLFHKSCVDPWLLDHRTCPMCKMNILKALGIPPNADCMDDLPTDFEGSLGGPPTNQITGASDTTVNESSVTLDPAVRTVGALQVVQDTDPIPQEGDVIFTTN

SEQ ID NO: 11505 - protein, 297 aa, Homo Sapiens
MSSHAQPLKLISPCPYSLSSGVEDIVAIMIPEPKGKEIVSLLERNITVTMYITIGTRNLQKYVSRTSVVFVSISFIVLMIISLAWLVFYYIQRFRYANARDRNQRRLGDAAKKAISKLQIRTIKKGDKETESDFDNCAVCIEGYKPNDVVRILPCRHLFHKSCVDPWLLDHRTCPMCKMNILKALGIPPNADCMDDLPTDFEGSLGGPPTNQITGASDTTVNESSVTLDPAVRTVGALQVVQDTDPIPQEGDVIFTTNSEQEPAVSSDSDISLIMAMEVGLSDVELSTDQDCEEVKS

SEQ ID NO: 11506 - protein, 208 aa, Homo Sapiens
HNVNSNELLNMVWNSEEIQQQIWIPSVFIGERSSEYLRALFVYEKGARVLLVPDNTFPLGYYLIPFTGIVGLLVLAMGAVMIARCIQHRKRLQRNRLTKEQLKQIPTHDYQKGDQYDVCAICLDEYEDGDKLRVLPCAHGEALTACPCPSATSSHQVLHLVPLCSLPQPLRGPLAHSDPEDLPHLQAACSSGSWGRRPRGRNSRARGG

SEQ ID NO: 11507 - protein, 72 aa, Homo Sapiens
MDFADLPALFGATLSQEGLQGFLVEAHPDNACSPIAPPPPAPVNGSVFIALLRRFDCNFDLKVLNAQKAGYG

SEQ ID NO: 11508 - protein, 315 aa, Homo Sapiens
MDFADLPALFGATLSQEGLQGFLVEAHPDNACSPIAPPPPAPVNGSVFIALLRRFDCNFDLKVLNAQKAGYGAAVVHNVNSNELLNMVWNSEEIQQQIWIPSVFIGERSSEYLRALFVYEKGARVLLVPDNTFPLGYYLIPFTGIVGLLVLAMGAVMIARCIQHRKRLQRNRLTKEQLKQIPTHDYQKGDQYDVCAICLDEYEDGDKLRVLPCAHAYHSRCVDPWLTQTRKTCPICKQPVHRGPGDEDQEEETQGQEEGDEGEPRDHPASERTPLLGSSPTLPTSFGSLAPAPLVFPGPSTDPPLSPPSSPVILV

SEQ ID NO: 11509 - protein, 133 aa, Homo Sapiens
MHPAAFPLPVVVAAVLWGAAPTRGLIRAGFLVEAHPDNACSPIAPPPPAPVNGSVFIALLRRFDCNFDLKVLNAQKAGYGAAVVHNVNSNELLNMVWNSEEIQQQIWIPSVFIGERSSEYLRALFVYEKGRPV

SEQ ID NO: 11510 - protein, 97 aa, Homo Sapiens
MHPAAFPLPVVVAAVLWGAAPTRGLIRATSDHNASMDFADLPALFGATLSQEGLQGFLVEAHPDNACSPIAPPPPAPVNGSVFIALLRRFDCNFDLK

SEQ ID NO: 11511 - protein, 122 aa, Homo Sapiens
MHPAAFPLPVVVAAVLWGAAPTRGLIRATSDHNASMDFADLPALFGATLSQEGLQGFLVEAHPDNACSPIAPPPPAPVNGSVFIALLRRFDCNFDLKVLNAQKAGYGAAVVHNVNSNELLNM

SEQ ID NO: 11512 - protein, 350 aa, Homo Sapiens [sequence omitted]

SEQ ID NO: 11513 - protein, 350 aa, Homo Sapiens [sequence omitted]

SEQ ID NO: 11514 - protein, 350 aa, Homo Sapiens [sequence omitted]

SEQ ID NO: 11515 - protein, 350 aa, Homo Sapiens [sequence omitted]

SEQ ID NO: 11516 - protein, 74 aa, Homo Sapiens
  misc_feature (1)..(1): Xaa can be any naturally occurring amino acid
XEIQQQIWIPSVFIGERSSEYLRALFVYEKGLPQPLRGPLAHSDPEDLPHLQAACSSGSWGRRPRGRNSRARGG

SEQ ID NO: 11517 - protein, 566 aa, Homo Sapiens
MDLHRAAFKMENSSYLPNPLASPALMVLASTAEASRDASIPCQQPRPFGVPVSVDKDVHIPFTNGSYTFASMYHRQGGVPGTFANRDFPPSLLHLHPQFAPPNLDCTPISMLNHSGVGAFRPFASTEDRESYQSAFTPAKRLKNCHDTESPHLRFSDADGKEYDFGTQLPSSSPGSLKVDDTGKKIFAVSGLISDREASSSPEDRNDRCKKKAAALFDSQAPICPICQVLLRPSELQEHMEQELEQLAQLPSSKNSLLKDAMAPGTPKSLLLSASIKREGESPTASPHSSATDDLHHSDRYQTFLRVRANRQTRLNARIGKMKRRKQDEGQREGSCMAEDDAVDIEHENNNRFEEYEWCGQKRIRATTLLEGGFRGSGFIMCSGKENPDSDADLDVDGDDTLEYGKPQYTEADVIPCTGEEPGEAKEREALRGAVLNGGPPSTRITPEFSKWASDEMPSTSNGESSKQEAMQKTCKNSDIEKITEDSAVTTFEALKARVRELERQLSRGDRYKCLICMDSYSMPLTSIQCWHVHCEECWLRTLGAKKLCPQCNTITAPGDLRRIYL

SEQ ID NO: 11518 - protein, 566 aa, Homo Sapiens; identical to SEQ ID NO: 11517

SEQ ID NO: 11519 - protein, 566 aa, Homo Sapiens; identical to SEQ ID NO: 11517

SEQ ID NO: 11520 - protein, 259 aa, Homo Sapiens
MPRARSGRRSRGAGGREETFLRVRANRQTRLNARIGKMKRRKQDEGQREGSCMAEDDAVDIEHENNNRFEEYEWCGQKRIRATTLLEGGFRGSGFIMCSGKENPDSDADLDVDGDDTLEYGKPQYTEADVIPCTGEEPGEAKEREALRGAVLNGGPPSTRITPEFSKWASDEMPSTSNGESSKQEAMQKTCKNSDIEKITEDSAVTTFEALKARVRELERQLSRGDRYKCLICMDSYSMPLTSIQCWHVHCEECWLRTL

SEQ ID NO: 11521 - protein, 260 aa, Homo Sapiens
MPRARSGRRSRGAGGREETFLRVRANRQTRLNARIGKMKRRKQDEGQVCPLCNRPLAGSEQEMSRHVEHCLSKREGSCMAEDDAVDIEHENNNRFEEYEWCGQKRIRATTLLEGGFRGSGFIMCSGKENPDSDADLDVDGDDTLEYGKPQYTEADVIPCTGEEPGEAKEREALRGAVLNGGPPSTRITPEFSKWASDEMPSTSNGESSKQEAMQKTCKNSDIEKITEDSAVTTFEALKARVRELERQLSRGDRYKCLICM

SEQ ID NO: 11522 - protein, 45 aa, Homo Sapiens
MPRARSGRRSRGAGGREEVDLSASTSQPADPTECSDWENETEEAR

SEQ ID NO: 11523 - protein, 121 aa, Homo Sapiens
  misc_feature (1)..(1): Xaa can be any naturally occurring amino acid
XEGESPTASPHSSATDDLHHSDRYQTFLRVRANRQTRLNARIGKMKRRKQDEGQVCPLCNRPLAGSEQEMSRHVEHCLSKREGSCMAEDDAVDIEHENNNRFEEYEWCGQKRIRATTLLEG

SEQ ID NO: 11524 - protein, 372 aa, Homo Sapiens
MKAGATSMWASCCGLLNEVMGTGAVRGQQSAFAGATGPFRFTPNPEFSTYPPAATEGPNIVCKACGLSFSVFRKKHVCCDCKKDFCSVCSVLQENLRRCSTCHLLQETAFQRPQLMRLKVKDLRQYLILRNIPIDTCREKEDLVDLVLCHHGLGSEDDMDTSSLNSSRSQTSSFFTRSFFSNYTAPSATMSSFQGELMDGDQTSRSGVPAQVQSEITSANTEDDDDDDDEDDDDEEENAEDRNPGLSKERVRASLSDLSSLDDVEGMSVRQLKEILARNFVNYSGCCEKWELVEKVNRLYKENEENQKSYGERLQLQDEEDDSLCRICMDAVIDCVLLECGHMVTCTKCGKRMSECPICRQYVVRAVHVFKS

SEQ ID NO: 11525 - protein, 507 aa, Homo Sapiens
MKAGATSMWASCCGLLNEVMGTGAVRGQQSAFAGATGPFRFTPNPEFSTYPPAATEGPNIVCKACGLSFSVFRKKHVCCDCKKDFCSVCSVLQENLRRCSTCHLLQETAFQRPQLMRLKVKDLRQYLILRNIPIDTCREKEDLVDLVLCHHGLGSEDDMDTSSLNSSRSQTSSFFTRSFFSNYTAPSATMSSFQGELMDGDQTSRSGVPAQVQSEITSANTEDDDDDDDEDDDDEEENAEDRNPGLSKERVRASLSDLSSLDDVEGMSVRQLKEILARNFVNYSGCCEKWELVEKVNRLYKENEENQKSYGERLQLQDEEDDSLCRICMDAVIDCVLLECGHMVTCTKCGKRMRMSSCKGRLRNGPESSAVTIQKDQRKVSAHSSPKRVVEQLLPWKDLQNGIALWSVVPRSKWKIKALIFVKSLPSQSPPRIYILILGLTQFLQEFFFYLPKLDTHRHLGYELLTAFLGDLLAVPQVNMTDVSTAFEEGQALISDLIAVCREEIVM

SEQ ID NO: 11526 - protein, 180 aa, Homo Sapiens
MKGELMDGDQTSRSGVPAQVQSEITSANTEDDDDDDDEDDDDEEENAEDRNPGLSKERVRASLSDLSSLDDVEGMSVRQLKEILARNFVNYSGCCEKWELVEKVNRLYKENEENQKSYGERLQLQDEEDDSLCRICMDAVIDCVLLECGHMVTCTKCGKRMSECPICRQYVVRAVHVFKS

SEQ ID NO: 11527 - protein, 45 aa, Homo Sapiens
MKMASGCSCRMRKTTACVASAWMPSSTVSYWSVGTWLPAPSAASA

SEQ ID NO: 11528 - protein, 373 aa, Homo Sapiens
MRKAGATSMWASCCGLLNEVMGTGAVRGQQSAFAGATGPFRFTPNPEFSTYPPAATEGPNIVCKACGLSFSVFRKKHVCCDCKKDFCSVCSVLQENLRRCSTCHLLQETAFQRPQLMRLKVKDLRQYLILRNIPIDTCREKEDLVDLVLCHHGLGSEDDMDTSSLNSSRSQTSSFFTRSFFSNYTAPSATMSSFQGELMDGDQTSRSGVPAQVQSEITSANTEDDDDDDDEDDDDEEENAEDRNPGLSKERVRASLSDLSSLDDVEGMSVRQLKEILARNFVNYSGCCEKWELVEKVNRLYKENEENQKSYGERLQLQDEEDDSLCRICMDAVIDCVLLECGHMVTCTKCGKRMSECPICRQYVVRAVHVFKS

SEQ ID NO: 11529 - protein, 38 aa, Homo Sapiens
MWASCCGLLNEVMGTGAVRGQQSAFAGATGPFRFTPNP

SEQ ID NO: 11530 - protein, 74 aa, Homo Sapiens
MWASCCGLLNEVMGTGAVRGQQSAFAGATGPFRFTPNPEFSTYPPAATEGPNIVCKACGLSFSVFRKKHVCCDC

SEQ ID NO: 11531 - protein, 163 aa, Homo Sapiens
MWASCCGLLNEVMGTGAVRGQQSAFAGATGPFRFTPNPEFSTYPPAATEGPNIVCKACGLSFSVFRKKHVCCDCKKDFCSVCSVLQENLRRCSTCHLLQETAFQRPQLMRLKVKDLRQYLILRNIPIDTCREKEDLVDLVLCHHGLGSEDDMDTSSLNSSRSQ

SEQ ID NO: 11532 - protein, 175 aa, Homo Sapiens
MAQVLIVGAGMTGSLCAALLRRQTSGPLYLAVWDKAEDSGGRMTTACSPHNPQCTADLGAQYITCTPHYAKKHQRFYDELLAYGVLRPLSSPIEGMVMKEGDCNFVAPQGISSIIKHYLKESGAEVYFRHRVTQINLRDDKWEVSKQTGSPEQFDLIVLTMPVPEILQLQGDITT

SEQ ID NO: 11533 - protein, 342 aa, Homo Sapiens
MAQVLIVGAGMTGSLCAALLRRQTSGPLYLAVWDKAEDSGGRMTTACSPHNPQCTADLGAQYITCTPHYAKKHQRFYDELLAYGVLRPLSSPIEGMVMKEGDCNFVAPQGISSIIKHYLKESGAEVYFRHRVTQINLRDDKWEVSKQTGSPEQFDLIVLTMPVPEILQLQGDITTLISECQRQQLEAVSYSSRYALGLFYEAGTKIDVPWAGQYITSNPCIRFVSIDNKKRNIESSEIGPSLVIHTTVPFGVTYLEHSIEDVQELVFQQLENILPGLPQPIATKCQKWRHSQVTNAAANCPGQMTLHHKPFLACGGDGFTQSNFDGCITSALCVLEALKNYI

SEQ ID NO: 11534 - protein, 315 aa, Homo Sapiens
MAQVLIVGAGMTGSLCAALLRRQTSGPLYLAVWDKAEDSGGRMTTACSPHNPQCTADLGAQYITCTPHYAKKHQRFYDELLAYGVLRPLSSPIEGMVMKEGDCNFVAPQGISSIIKHYLKESGAEVYFRHRVTQINLRDDKWEVSKQTGSPEQFDLIVLTMPVPEILQLQGDITTLISECQRQQLEAVSYSSRYALGLFYEAGTKIDVPWAGQYITSNPCIRFVSIDNKKRNIESSEIGPSLVIHTTVPFGVTYLEHSIEDVQELVFQQLENILPGLPQPIATKCQKWRHSQVPSAGVILGCAKSPWMMAIGFPI

SEQ ID NO: 11535 - protein, 171 aa, Homo Sapiens
FRAFELLHLHLDLRAEFGPPGPGAGSRGLSGTAVLDLRCLEPEGAAELRLDSHPCLEVTAAALRRERPGSEEPPAEPVSFYTQPFSHYGQALCVSFPQPCRAAERLQVLLTYRVGEGPGVCWLAPEQTAGKKKPFVYTQGQAVLNRAFFPCFDTPAVKYKYSALIEEPGVG

SEQ ID NO: 11536 - protein, 168 aa, Homo Sapiens
LIDAAKEEYNGVIEEFLATGEKLFGPYVWGRYDLLFMPPSFPFGGMENPCLTFVTPCLLAGDRSLADVIIHEISHSWFGNLVTNANWGEFWLNEGFTMYAQRRISTILFGVDPDDTYNETPYEKGFCFVSYLAHLVGDQDQFDSFLKAYVHEFKFRSILADDFLDFYL

SEQ ID NO: 11537 - protein, 650 aa, Homo Sapiens
MASGEHSPGSGAARRPLHSAQAVDVASASNFRAFELLHLHLDLRAEFGPPGPGAGSRGLSGTAVLDLRCLEPEGAAELRLDSHPCLEVTAAALRRERPGSEEPPAEPVSFYTQPFSHYGQALCVSFPQPCRAAERLQVLLTYRVGEGPGVCWLAPEQTAGKKKPFVYTQGQAVLNRAFFPCFDTPAVKYKYSALIEVPDGFTAVMSASTWEKRGPNKFFFQMCQPIPSYLIALAIGDLVSAEVGPRSRVWAEPCLIDAAKEEYNGVIEEFLATGEKLFGPYVWGRYDLLFMPPSFPFGGMENPCLTFVTPCLLAGDRSLADVIIHEISHSWFGNLVTNANWGEFWLNEGFTMYAQRRISTILFGAAYTCLEAATGRALLRQHMDITGEENPLNKLRVKIEPGVDPDDTYNETPYEKGFCFVSYLAHLVGDQDQFDSFLKAYVHEFKFRSILADDFLDFYLEYFPELKKKRVDIIPGFEFDRWLNTPGWPPYLPDLSPGDSLMKPAEELAQLWAAEELDMKAIEAVAISPWKTYQLVYFLDKILQKSPLPPGNVKKLGDTYPSISNARNAELRLRWGQIVLKNDHQEDFWKVKEFLHNQGKQKYTLPLYHAMMGGSEVAQTLAKETFASTASQLHSNVVNYVQQIVAPKGS

SEQ ID NO: 11538 - protein, 611 aa, Homo Sapiens
MASGEHSPGSGAARRPLHSAQAVDVASASNFRAFELLHLHLDLRAEFGPPGPGAGSRGLSGTAVLDLRCLEPEGAAELRLDSHPCLEVTAAALRRERPGSEEPPAEPVSFYTQPFSHYGQALCVSFPQPCRAAERLQVLLTYRVGEGPGVCWLAPEQTAGKKKPFVYTQGQAVLNRAFFPCFDTPAVKYKYSALIEVPDGFTAVMSASTWEKRGPNKFFFQMCQPIPSYLIALAIGDLVSAEVGPRYDLLFMPPSFPFGGMENPCLTFVTPCLLAGDRSLADVIIHEISHSWFGNLVTNANWGEFWLNEGFTMYAQRRISTILFGAAYTCLEAATGRALLRQHMDITGEENPLNKLRVKIEPGVDPDDTYNETPYEKGFCFVSYLAHLVGDQDQFDSFLKAYVHEFKFRSILADDFLDFYLEYFPELKKKRVDIIPGFEFDRWLNTPGWPPYLPDLSPGDSLMKPAEELAQLWAAEELDMKAIEAVAISPWKTYQLVYFLDKILQKSPLPPGNVKKLGDTYPSISNARNAELRLRWGQIVLKNDHQEDFWKVKEFLHNQGKQKYTLPLYHAMMGGSEVAQTLAKETFASTASQLHSNVVNYVQQIVAPKGS

SEQ ID NO: 11539 - protein, 344 aa, Homo Sapiens
MTCCSCTSLSALLDFWAEVCWLAPEQTAGKKKPFVYTQGQAVLNRAFFPCFDTPAVKYKYSALIEVPDGFTAVMSASTWEKRGPNKFFFQMCQPIPSYLIALAIGDLVSAEVGPRSRVWAEPCLIDAAKEEYNGVIEEFLATGEKLFGPYVWGRYDLLFMPPSFPFGGMENPCLTFVTPCLLAGDRSLADVIIHEISHSWFGNLVTNANWGEFWLNEGFTMYAQRRISTILFGAAYTCLEAATGRALLRQHMDITGEENPLNKLRVKIEPGVDPDDTYNETPYEKGFCFVSYLAHLVGDQDQFDSFLKAYVHEFKFRSILADDFLDFYLEYFPELKKKRVDIIP

SEQ ID NO: 11540 - protein, 151 aa, Homo Sapiens
  misc_feature (1)..(1): Xaa can be any naturally occurring amino acid
XPGAGSRGLSGTAVLDLRCLEPEGAAELRLDSHPCLEVTAAALRRERPGSEEPPAEPVSFYTQPFSHYGQALCVSFPQPCRAAERLQVLLTYRVGEGPGVCWLAPEQTAGKKKPFVYTQGQAVLNRAFFPCFDTPAVKYKYSALIEEPGVG

SEQ ID NO: 11541 - protein, 937 aa, Homo Sapiens
MHRPRRRGTRPPLLALLAALLLAARGAAAQETELSVSAELVPTSSWNISSELNKDSYLTLDEPMNNITTSLGQTAELHCKVSGNPPPTIRWFKNDAPVVQEPRRLSFRSTIYGSRLRIRNLDTTDTGYFQCVATNGKEVVSSTGVLFVKFGPPPTASPGYSDEYEEDGFCQPYRGIACARFIGNRTVYMESLHMQGEIENQITAAFTMIGTSSHLSDKCSQFAIPSLCHYAFPYCDETSSVPKPRDLCRDECEILENVLCQTEYIFARSNPMILMRLKLPNCEDLPQPESPEAANCIRIGIPMADPINKNHKCYNSTGVDYRGTVSVTKSGRQCQPWNSQYPHTHTFTALRFPELNGGHSYCRNPGNQKEAPWCFTLDENFKSDLCDIPACDSKDSKEKNKMEILYILVPSVAIPLAIALLFFFICVCRNNQKSSSAPVQRQPKHVRGQNVEMSMLNAYKPKSKAKELPLSAVRFMEELGECAFGKIYKGHLYLPGMDHAQLVAIKTLKDYNNPQQWTEFQQEASLMAELHHPNIVCLLGAVTQEQPVCMLFEYINQGDLHEFLIMRSPHSDVGCSSDEDGTVKSSLDHGDFLHIAIQIAAGMEYLSSHFFVHKDLAARNILIGEQLHVKISDLGLSREIYSADYYRVQSKSLLPIRWMPPEAIMYGKFSSDSDIWSFGVVLWEIFSFGLQPYYGFSNQEVIEMVRKRQLLPCSEDCPPRMYSLMTECWNEIPSRRPRFKDIHVRLRSWEGLSSHTSSTTPSGGNATTQTTSLSASPVSNLSNPRYPNYMFPSQGITPQGQIAGFIGPPIPQNQRFIPINGYPIPPGYAAFPAAHYQPTGPPRVIQHCPPPKSRSPSSASGSTSTGHVTSLPSSGSNQEANIPLLPHMSIPNHPGGMGITVFGNKSQKPYKIDSKQASLLGDANIHGHTESMISAEL

SEQ ID NO: 11542 - protein, 393 aa, Homo Sapiens
MHRPRRRGTRPPLLALLAALLLAARGAAAQETELSVSAELVPTSSWNISSELNKDSYLTLDEPMNNITTSLGQTAELHCKVSGNPPPTIRWFKNDAPVVQEPRRLSFRSTIYGSRLRIRNLDTTDTGYFQCVATNGKEVVSSTGVLFVKFGPPPTASPGYSDEYEEDGFCQPYRGIACARFIGNRTVYMESLHMQGEIENQITAAFTMIGTSSHLSDKCSQFAIPSLCHYAFPYCDETSSVPKPRDLCRDECEILENVLCQTEYIFARSNPMILMRLKLPNCEDLPQPESPEAANCIRIGIPMADPINKNHKCYNSTGVDYRGTVSVTKSGRQCQPWNSQYPHTHTFTALRFPELNGGHSYCRNPGNQKEAPWCFTLDENFKSDLCDIPACGK

SEQ ID NO: 11543 - protein, 882 aa, Homo Sapiens
SYLTLDEPMNNITTSLGQTAELHCKVSGNPPPTIRWFKNDAPVVQEPRRLSFRSTIYGSRLRIRNLDTTDTGYFQCVATNGKEVVSSTGVLFVKFGPPPTASPGYSDEYEEDGFCQPYRGIACARFIGNRTVYMESLHMQGEIENQITAAFTMIGTSSHLSDKCSQFAIPSLCHYAFPYCDETSSVPKPRDLCRDECEILENVLCQTEYIFARSNPMILMRLKLPNCEDLPQPESPEAANCIRIGIPMADPINKNHKCYNSTGVDYRGTVSVTKSGRQCQPWNSQYPHTHTFTALRFPELNGGHSYCRNPGNQKEAPWCFTLDENFKSDLCDIPACDSKDSKEKNKMEILYILVPSVAIPLAIALLFFFICVCRNNQKSSSAPVQRQPKHVRGQNVEMSMLNAYKPKSKAKELPLSAVRFMEELGECAFGKIYKGHLYLPGMDHAQLVAIKTLKDYNNPQQWTEFQQEASLMAELHHPNIVCLLGAVTQEQPVCMLFEYINQGDLHEFLIMRSPHSDVGCSSDEDGTVKSSLDHGDFLHIAIQIAAGMEYLSSHFFVHKDLAARNILIGEQLHVKISDLGLSREIYSADYYRVQSKSLLPIRWMPPEAIMYGKFSSDSDIWSFGVVLWEIFSFGLQPYYGFSNQEVIEMVRKRQLLPCSEDCPPRMYSLMTECWNEIPSRRPRFKDIHVRLRSWEGLSSHTSSTTPSGGNATTQTTSLSASPVSNLSNPRYPNYMFPSQGITPQGQIAGFIGPPIPQNQRFIPINGYPIPPGYAAFPAAHYQPTGPPRVIQHCPPPKSRSPSSASGSTSTGHVTSLPSSGSNQEANIPLLPHMSIPNHPGGMGITVFGNKSQKPYKIDSKQASLLGDANIHGHTESMISAEL

SEQ ID NO: 11544 - protein, 180 aa, Homo Sapiens
MSHRKFSAPRHGSLGFLPRKRSSRHRGKVKSFPKDDPSKPVHLTAFLGYKAGMTHIVREVDRPGSKVNKKEVVEAVTIVETPPMVVVGIVGYVETPRGLRTFKTVFAEHISDECKRRFYKNCSARLCPMSSIQAPLAGGKGSLEAGNELHPHAVPVCLPLTPRRGDEGLHLVPSPTLLCS

SEQ ID NO: 11545 - protein, 403 aa, Homo Sapiens
MSHRKFSAPRHGSLGFLPRKRSSRHRGKVKSFPKDDPSKPVHLTAFLGYKAGMTHIVREVDRPGSKVNKKEVVEAVTIVETPPMVVVGIVGYVETPRGLRTFKTVFAEHISDECKRRFYKNWHKSKKKAFTKYCKKWQDEDGKKQLEKDFSSMKKYCQVIRVIAHTQMRLLPLRQKKAHLMEIQVNGGTVAEKLDWARERLEQQVPVNQVFGQDEMIDVIGVTKGKGYKGVTSRWHTKKLPRKTHRGLRKVACIGAWHPARVAFSVARAGQKGYHHRTEINKKIYKIGQGYLIKDGKLIKNNASTDYDLSDKSINPLGGFVHYGEVTNDFVMLKGCVVGTKKRVLTLRKSLLVQTKRRALEKIDLKFIDTTSKFGHGRFQTMEEKKAFMGPLKKDRIAKEEGA

SEQ ID NO: 11546 - protein, 351 aa, Homo Sapiens
MTHIVREVDRPGSKVNKKEVVEAVTIVETPPMVVVGIVGYVETPRGLRTFKTVFAEHISDECKRRFYKNWHKSKKKAFTKYCKKWQDEDGKKQLEKDFSSMKKYCQVIRVIAHTQMRLLPLRQKKAHLMEIQVNGGTVAEKLDWARERLEQQVPVNQVFGQDEMIDVIGVTKGKGYKGVTSRWHTKKLPRKTHRGLRKVACIGAWHPARVAFSVARAGQKGYHHRTEINKKIYKIGQGYLIKDGKLIKNNASTDYDLSDKSINPLGGFVHYGEVTNDFVMLKGCVVGTKKRVLTLRKSLLVQTKRRALEKIDLKFIDTTSKFGHGRFQTMEEKKAFMGPLKKDRIAKEEGA

SEQ ID NO: 11547 - protein, 272 aa, Homo Sapiens
MTHIVREVDRPGSKVNKKEVVEAVTIVETPPMVVVGIVGYVETPRGLRTFKTVFAEHISDECKRRFYKNWHKSKKKAFTKYCKKWQDEDGKKQLEKDFSSMKKYCQVIRVIAHTQMRLLPLRQKKAHLMEIQVNGGTVAEKLDWARERLEQQVPVNQVFGQDEMIDVIGVTKGKGYKGVTSRWHTKKLPRKTHRGLRKVACIGAWHPARVAFSVARAGQKGYHHRTEINKKIYKIGQGYLIKDGKLIKNNASTDYDLSDKSINPLGGFVHYG

SEQ ID NO: 11548 - protein, 305 aa, Homo Sapiens
QMMNLLTGGQKLCADCHVLIWLCGVLWPSHRKFSAPRHGSLGFLPRKRSSRHRGKVKSFPKDDPSKPVHLTAFLGYKAGMTHIVREVDRPGSKVNKKEVVEAVTIVETPPMVVVGIVGYVETPRGLRTFKTVFAEHISDECKRRFYKNWHKSKKKAFTKYCKKWQDEDGKKQLEKDFSSMKKYCQVIRVIAHTQMRLLPLRQKKAHLMEIQVNGGTVAEKLDWARERLEQQVPVNQVFGQDEMIDVIGVTKGKGYKGVTSRWHTKKLPRKTHRGLRKVACIGAWHPARVAFSVARAGQKGYHHRT

SEQ ID NO: 11549 - protein, 261 aa, Homo Sapiens
  misc_feature (1)..(1): Xaa can be any naturally occurring amino acid
XVCVVMAAVSLSPASARLNPRRIAAIPSWPAPGSHRKFSAPRHGSLGFLPRKRSSRHRGKVKSFPKDDPSKPVHLTAFLGYKAGMTHIVREVDRPGSKVNKKEVVEAVTIVETPPMVVVGIVGYVETPRGLRTFKTVFAEHISDECKRRFYKNWHKSKKKAFTKYCKKWQDEDGKKQLEKDFSSMKKYCQVIRVIAHTQMRLLPLRQKKAHLMEIQVNGGTVAEKLDWARERLEQQVPVNQVFGQDEMIDVIGVTKGKGYK

SEQ ID NO: 11550 - protein, 115 aa, Homo Sapiens
MRYVASYLLAALGGNSSPSAKDIKKILDSVGIEADDDRLNKVISELNGKNIEDVIAQGIGKLASVPAGGAVAVSAAPGSAAPAAGSAPAAAEEKKDEKKEESEESDDDMGFGLFD

SEQ ID NO: 11551 - protein, 115 aa, Homo Sapiens; identical to SEQ ID NO: 11550

SEQ ID NO: 11552 - protein, 92 aa, Homo Sapiens
  misc_feature (1)..(1): Xaa can be any naturally occurring amino acid
XGGNSSPSAKDIKKILDSVISELNGKNIEDVIAQGIGKLASVPAGGAVAVSAAPGSAAPAAGSAPAAAEEKKDEKKEESEESDDDMGFGLFD

SEQ ID NO: 11553 - protein, 138 aa, Homo Sapiens
ELDTSERKIEFDSASGTYTLYLIIGDATLKNPILWNVADVVIKFPEEEAPSTVLSQNLFTPKQEIQWIRIGANVSNFTFAPSTIIFHLGHAAMLGLMYVYWTQLNMFQTLKYLAILGSVTFLAGNRMLAQQAVKRTAH

SEQ ID NO: 11554 - protein, 615 aa, Homo Sapiens
MAPPGSSTVFLLALTIIASTWALTPTHYLTKHDVERLKASLDRPFTNLESAFYSIVGLSSLGAQVPDAKISISNETKDLLLAAVSEDSSVTQIYHAVAALSGFGLPLASQEALSALTARLSKEETVLATVQALQTASHLSQQADLRSIVEEIEDLVARLDELGGVYLQFEEGLETTALFVAATYKLMDHVGTEPSIKEDQVIQLMNAIFSKKNFESLSEAFSVASAAAVLSHNRYHVPVVVVPEGSASDTHEQAILRLQVTNVLSQPLTQATVKLEHAKSVASRATVLQKTSFTPVGDVFELNFMNVKFSSGYYDFLVEVEGDNRYIANTVELRVKISTEVGITNVDLSTVDKDQSIAPKTTRVTYPAKAKGTFIADSHQNFALFFQLVDVNTGAELTPHQTFVRLHNQKTGQEVVFVAEPDNKNVYKFELDTSERKIEFDSASGTYTLYLIIGDATLKNPILWNVADVVIKFPEEEAPSTVLSQNLFTPKQEIQHLFREPEKRPPTVVSNTFTALILSPLLLLFALWIRIGANVSNFTFAPSTIIFHLGHAAMLGLMYVYWTQLNMFQTLKYLAILGSVTFLAGNRMLAQQAVKRIAAEQSSRLAKYRTLRTAH

SEQ ID NO: 11555 - protein, 345 aa, Homo Sapiens
MAPPGSSTVFLLALTIIASTWALTPTHYLTKHDVERLKASLDRPFTNLESAFYSIVGLSSLGAQVPDAKKACTYIRSNLDPSNVDSLFYAAQASQALSGCEISISNETKDLLLAAVSEDSSVTQIYHAVAALSGFGLPLASQEALSALTARLSKEETVLARVWSTVLESRSLFSKRTVQALQTASHLSQQADLRSIVEEIEDLVARLDELGGVYLQFEEGLETTALFVAATYKLMDHVGTEPSIKEDQVIQLMNAIFSKKNFESLSEAFSVASAAAVLSHNRYHVPVVVVPEGSASDTHEQAILRLQVTNVLSQPLTQATVKLEHAKSVASRATVLQKTSFTPVG

SEQ ID NO: 11556 - protein, 631 aa, Homo Sapiens
MAPPGSSTVFLLALTIIASTWALTPTHYLTKHDVERLKASLDRPFTNLESAFYSIVGLSSLGAQVPDAKKACTYIRSNLDPSNVDSLFYAAQASQALSGCEISISNETKDLLLAAVSEDSSVTQIYHAVAALSGFGLPLASQEALSALTARLSKEETVLATVQALQTASHLSQQADLRSIVEEIEDLVARLDELGGVYLQFEEGLETTALFVAATYKLMDHVGTEPSIKEDQVIQLMNAIFSKKNFESLSEAFSVASAAAVLSHNRYHVPVVVVPEGSASDTHEQAILRLQVTNVLSQPLTQATVKLEHAKSVASRATVLQKTSFTPVGDVFELNFMNVKFSSGYYDFLVEVEGDNRYIANTVELRVKISTEVGITNVDLSTVDKDQSIAPKTTRVTYPAKAKGTFIADSHQNFALFFQLVDVNTGAELTPHQTFVRLHNQKTGQEVVFVAEPDNKNVYKFELDTSERKIEFDSASGTYTLYLIIGDATLKNPILWNVADVVIKFPEEEAPSTVLSQNLFTPKQEIQHLFREPEKRPPTVVSNTFTALILSPLLLLFALWIRIGANVSNFTFAPSTIIFHLGHAAMLGLMYVYWTQLNMFQTLKYLAILGSVTFLAGNRMLAQQAVKRTAH

SEQ ID NO: 11557 - protein, 162 aa, Homo Sapiens
MQRKHVPTSDLTLIPAMWIPSSTLPRPARPSQDVRTVQALQTASHLSQQADLRSIVEEIEDLVARLDELGGVYLQFEEGLETTALFVAATYKLMDHVGTEPSIKEDQVIQLMNAIFSKKNFESLSEAFSVASAAAVLSHNRYHVPVVVVPEGSASDTHEQAI

SEQ ID NO: 11558 - protein, 167 aa, Homo Sapiens
MQRTVQALQTASHLSQQADLRSIVEEIEDLVARLDELGGVYLQFEEGLETTALFVAATYKLMDHVGTEPSIKEDQVIQLMNAIFSKKNFESLSEAFSVASAAAVLSHNRYHVPVVVVPEGSASDTHEQAILRLQVTNVLSQPLTQATVKLEHAKSVASRATVLQKTS

SEQ ID NO: 11559 - protein, 147 aa, Homo Sapiens
  misc_feature (1)..(1): Xaa can be any naturally occurring amino acid
XGTYTLYLIIGDATLKNPILWNVADVVIKFPEEEAPSTVLSQNLFTPKQEIQHLFREPEKRPPTVVSNTFTALILSPLLLLFALWIRIGANVSNFTFAPSTIIFHLGHAEQHISSRRKMEILKTECQEKESRTIHSMRRKMEKKNFI

SEQ ID NO: 11560 - protein, 100 aa, Homo Sapiens
MCQRCGLKLIVIICFFVQLARDLLHPSLEEEKKKHKKKRLVQSPNSYFMDVKCPGCYKITTVFSHAQTVVLCVGCSTVLCQPTGGKARLTEGCSFRRKQH

SEQ ID NO: 11561 - protein, 52 aa, Homo Sapiens
MDVKCPGCYKITTVFSHAQTVVLCVGCSTVLCQPTGGKARLTEGCSFRRKQH

SEQ ID NO: 11562 - protein, 52 aa, Homo Sapiens; identical to SEQ ID NO: 11561

SEQ ID NO: 11563 - protein, 52 aa, Homo Sapiens; identical to SEQ ID NO: 11561

SEQ ID NO: 11564 - protein, 84 aa, Homo Sapiens
MPLARDLLHPSLEEEKKKHKKKRLVQSPNSYFMDVKCPGCYKITTVFSHAQTVVLCVGCSTVLCQPTGGKARLTEGCSFRRKQH

SEQ ID NO: 11565 - protein, 97 aa, Homo Sapiens
MPLARDLLHPSLEEEKKKHKKKRLVQSPNSYFMDVKCPGCYKITTVFSHAQTVVLCVGCSTVLCQPTGGKARLTEGISFGILQPSDEIDDYKCLYLH

SEQ ID NO: 11566 - protein, 224 aa, Homo Sapiens
MSRKIEGFLLLLLFGYEATLGLSSTEDEGEDPWYQKACKCDCQGGPNALWSAGATSLDCIPECPYHKPLGFESGEVTPDQITCSNPEQYVGWYSSWTANKARLNSQGFGCAWLSKFQDSSQWLQIDLKEIKVISGILTQGRCDIDEWMTKYSVQYRTDERLNWIYYKDQTGNNRVFYGNSDRTSTVQNLLRPPIISRFIRLIPLGWHVRIAIRMELLECVSKCA

SEQ ID NO: 11567 - protein, 702 aa, Homo Sapiens
ATAAAAAAVMAPPGCPGSCPNFAVVCSFLERYGPLLDLPELPFPELERVLQAPPPDVGNGEVPKELVELHLKLMRKIGKSVTADRWEKYLIKICQEFNSTWAWEMEKKGYLEMSVECKLALLKYLCECQFDDNLKFKNIINEEDADTMRLQPIGRDKDGLMYWYQLDQDHNVRMYIEEQDDQDGSSWKCIVRNRNELAETLALLKAQIDPVLLKNSSQQDNSSRESPSLEDEETKKEEETPKQEEQKESEKMKSEEQPMDLENRSTANVLEETTVKKEKEDEKELVKLPVIVKLEKPLPENEEKKIIKEESDSFKENVKPIKVEVKECRADPKDTKSSMEKPVAQEPERIEFGGNIKSSHEITEKSTEETEKLKNDQQAKIPLKKREIKLSDDFDSPVKGPLCKSVTPTKEFLKDEIKQEEETCKRISTITALGHEGKQLVNGEVSDERVAPNFKTEPIETKFYETKEESYSPSKDRNIITEGNGTESLNSVITSMKTGELEKETAPLRKDADSSISVLEIHSQKAQIEEPDPPEMETSLDSSEMAKDLSSKTALSSTESCTMKGEEKSPKTKKDKRPPILECLEKLEKSKKTFLDKDAQRLSPIPEEVPKSTLESEKPGSPEAAETSPPSNIIDHCEKLASEKEVVECQSTSTVGGQSVKKVDLETLKEDSEFTKVEMDNLDNAQTSGIEEPSETKGSMQK

SEQ ID NO: 11568 - protein, 276 aa, Homo Sapiens
EPCKKCGLPNHPELILLCDSCDSGYHTACLRPPLMIIPDGEWFCPPCQHKLLCEKLEEQLQDLDVALKKKERAERRKERLVYVGISIENIIPPQEPDFSEDQEEKKKDSKKSKANLLERRSTRTRKCISYRFDEFDEAIDEAIEDDIKEADGGGVGRGKDISTITGHRGKDISTILDEERKENKRPQRAAAARRKKRRRLNDLDSDSNLDEEESEDEFKISDGSQDEFVVSDENPDESEEDPPSNDDSDTDFCSRRLRRHPSRPMRQSRRLRRKTP

SEQ ID NO: 11569 - protein, 803 aa, Homo Sapiens
ETLALLKAQIDPVLLKNSSQQDNSSRESPSLEDEETKKEEETPKQEEQKESEKMKSEEQPMDLENRSTANVLEETTVKKEKEDEKELVKLPVIVKLEKPLPENEEKKIIKEESDSFKENVKPIKVEVKECRADPKDTKSSMEKPVAQEPERIEFGGNIKSSHEITEKSTEETEKLKNDQQAKIPLKKREIKLSDDFDSPVKGPLCKSVTPTKEFLKDEIKQEEETCKRISTITALGHEGKQLVNGEVSDERVAPNFKTEPIETKFYETKEESYSPSKDRNIITEGNGTESLNSVITSMKTGELEKETAPLRKDADSSISVLEIHSQKAQIEEPDPPEMETSLDSSEMAKDLSSKTALSSTESCTMKGEEKSPKTKKDKRPPILECLEKLEKSKKTFLDKDAQRLSPIPEEVPKSTLESEKPGSPEAAETSPPSNIIDHCEKLASEKEVVECQSTSTVGGQSVKKVDLETLKEDSEFTKVEMDNLDNAQTSGIEEPSETKGSMQKSKFKYKLVPEEETTASENTEITSERQKEGIKLTIRISSRKKKPDSPPKVLEPENKQEKTEKEEEKTNVGRTLRRSPRISRPTAKVAEIRDQKADKKRGEGEDEVEEESTALQKTDKKEILKKSEKDTNSKVSKVKPKGKVRWTGSRTRGRWKYSSNDESEGSGSEKSSAASEEEEEKESEEAILADDDEPCKKCGLPNHPELILLCDSCDSGYHTACLRPPLMIIPDGEWFCPPCQHKLLCEKLEEQLQDLDVALKKKERAERRKERLVYVGISIENIIPPQEPDFSEDQEEKKKDSKK

SEQ ID NO: 11570 - protein, 1441 aa, Homo Sapiens
MATAAAAAAVMAPPGCPGSCPNFAVVCSFLERYGPLLDLPELPFPELERVLQAPPPDVGNGEVPKELVELHLKLMRKIGKSVTADRWEKYLIKICQEFNSTWAWEMEKKGYLEMSVECKLALLKYLCECQFDDNLKFKNIINEEDADTMRLQPIGRDKDGLMYWYQLDQDHNVRMYIEEQDDQDGSSWKCIVRNRNELAETLALLKAQIDPVLLKNSSQQDNSSRESPSLEDEETKKEEETPKQEEQKESEKMKSEEQPMDLENRSTANVLEETTVKKEKEDEKELVKLPVIVKLEKPLPENEEKKIIKEESDSFKENVKPIKVEVKECRADPKDTKSSMEKPVAQEPERIEFGGNIKSSHEITEKSTEETEKLKNDQQAKIPLKKREIKLSDDFDSPVKGPLCKSVTPTKEFLKDEIKQEEETCKRISTITALGHEGKQLVNGEVSDERVAPNFKTEPIETKFYETKEESYSPSKDRNIITEGNGTESLNSVITSMKTGELEKETAPLRKDADSSISVLEIHSQKAQIEEPDPPEMETSLDSSEMAKDLSSKTALSSTESCTMKGEEKSPKTKKDKRPPILECLEKLEKSKKTFLDKDAQRLSPIPEEVPKSTLESEKPGSPEAAETSPPSNIIDHCEKLASEKEVVECQSTSTVGGQSVKKVDLETLKEDSEFTKVEMDNLDNAQTSGIEEPSETKGSMQKSKFKYKLVPEEETTASENTEITSERQKEGIKLTIRISSRKKKPDSPPKVLEPENKQEKTEKEEEKTNVGRTLRRSPRISRPTAKVAEIRDQKADKKRGEGEDEVEEESTALQKTDKKEILKKSEKDTNSKVSKVKPKGKVRWTGSRTRGRWKYSSNDESEGSGSEKSSAASEEEEEKESEEAILADDDEPCKKCGLPNHPELILLCDSCDSGYHTACLRPPLMIIPDGEWFCPPCQHKLLCEKLEEQLQDLDVALKKKERAERRKERLVYVGISIENIIPPQEPDFSEDQEEKKKDSKKSKANLLERRSTRTRKCISYRFDEFDEAIDEAIEDDIKEADGGGVGRGKDISTITGHRGKDISTILDEERKENKRPQRAAAARRKKRRRLNDLDSDSNLDEEESEDEFKISDGSQDEFVVSDENPDESEEDPPSNDDSDTDFCSRRLRRHPSRPMRQSRRLRRKTPKKKYSDDDEEEESEENSRDSESDFSDDFSDDFVETRRRRSRRNQKRQINYKEDSESDGSQKSLRRGKEIRRVHKRRLSSSESEESYLSKNSEDDELAKESKRSVRKRGRSTDEYSEADEEEEEEEGKPSRKRLHRIETDEEESCDNAHGDANQPARDSQPRVLPSEQESTKKPYRIESDEEEDFENVGKVGSPLDYSLVDLPSTNGQSPGKAIENLIGKPTEKSQTPKDNSTASASLASNGTSGGQEAGAPEEEEDELLRVTDLVDYVCNSEQL

SEQ ID NO: 11571 - protein, 1189 aa, Homo Sapiens
MKSEEQPMDLENRSTANVLEETTVKKEKEDEKELVKLPVIVKLEKPLPENEEKKIIKEESDSFKENVKPIKVEVKECRADPKDTKSSMEKPVAQEPERIEFGGNIKSSHEITEKSTEETEKLKNDQQAKIPLKKREIKLSDDFDSPVKGPLCKSVTPTKEFLKDEIKQEEETCKRISTITALGHEGKQLVNGEVSDERVAPNFKTEPIETKFYETKEESYSPSKDRNIITEGNGTESLNSVITSMKTGELEKETAPLRKDADSSISVLEIHSQKAQIEEPDPPEMETSLDSSEMAKDLSSKTALSSTESCTMKGEEKSPKTKKDKRPPILECLEKLEKSKKTFLDKDAQRLSPIPEEVPKSTLESEKPGSPEAAETSPPSNIIDHCEKLASEKEVVECQSTSTVGGQSVKKVDLETLKEDSEFTKVEMDNLDNAQTSGIEEPSETKGSMQKSKFKYKLVPEEETTASENTEITSERQKEGIKLTIRISSRKKKPDSPPKVLEPENKQEKTEKEEEKTNVGRTLRRSPRISRPTAKVAEIRDQKADKKRGEGEDEVEEESTALQKTDKKEILKKSEKDTNSKVSKVKPKGKVRWTGSRTRGRWKYSSNDESEGSGSEKSSAASEEEEEKESEEAILADDDEPCKKCGLPNHPELILLCDSCDSGYHTACLRPPLMIIPDGEWFCPPCQHKLLCEKLEEQLQDLDVALKKKERAERRKERLVYVGISIENIIPPQEPDFSEDQEEKKKDSKKSKANLLERRSTRTRKCISYRFDEFDEAIDEAIEDDIKEADGGGVGRGKDISTITGHRGKDISTILDEERKENKRPQRAAAARRKKRRRLNDLDSDSNLDEEESEDEFKISDGSQDEFVVSDENPDESEEDPPSNDDSDTDFCSRRLRRHPSRPMRQSRRLRRKTPKKKYSDDDEEEESEENSRDSESDFSDDFSDDFVETRRRRSRRNQKRQINYKEDSESDGSQKSLRRGKEIRRVHKRRLSSSESEESYLSKNSEDDELAKESKRSVRKRGRSTDEYSEADEEEEEEEGKPSRKRLHRIETDEEESCDNAHGDANQPARDSQPRVLPSEQESTKKPYRIESDEEEDFENVGKVGSPLDYSLVDLPSTNGQSPGKAIENLIGKPTEKSQTPKDNSTASASLASNGTSGGQEAGAPEEEEDELLRVTDLVDYVCNSEQL

SEQ ID NO: 11572 - protein, 202 aa, Homo Sapiens
  misc_feature (1)..(1): Xaa can be any naturally occurring amino acid
XAAAAAAVMAPPGCPGSCPNFAVVCSFLERYGPLLDLPELPFPELERVLQAPPPDVGNGEVPKELVELHLKLMRKIGKSVTADRWEKYLIKYLCECQFDDNLKFKNIINEEDADTMRLQPIGRDKDGLMYWYQLDQDHNVRMYIEEQDDQDGSSWKCIVRNRNELAETLALLKAQIDPVLLKNSSQQDNSSRESPSLEDEET

SEQ ID NO: 11573 - protein, 165 aa, Homo Sapiens
  misc_feature (1)..(1): Xaa can be any naturally occurring amino acid
XKPDSPPKVLEPENKQEKTEKEEEKTNVGRTLRRSPRISRPTAKVAEIRDQKADKKRGEGEDEVEEESTALQKTDKKEILKKSEKDTNSKVKPKGKVRWTGSRTRGRWKYSSNDESEGSGSEKSSAASEEEEEKESEEAILADDDEPCKKCGLPNHPELILLCDS

SEQ ID NO: 11574 - protein, 236 aa, Homo Sapiens
MIFRVSAEGSQACAKGCELCSEVNGCLKCSPKLFILLERNDIRQVGVCLPSCPPGYFDARNPDMNKCIKCKIEHCEACFSHNFCTKCKEGLYLHKGRCYPACPEGSSAANGTMECSSPAQCEMSEWSPWGPCSKKQQLCGFRRGSEERTRRVLHAPVGDHAACSDTKETRRCTVRRVPCPEGQKRRKGGQGRRENANRNLARKESKEAGAGSRRRKGQQQQQQQGTVGPLTSAGPA

SEQ ID NO: 11575 - protein, 263 aa, Homo Sapiens
MRLGLCVVALVLSWTHLTISSRGIKGKRQRRISAEGSQACAKGCELCSEVNGCLKCSPKLFILLERNDIRQVGVCLPSCPPGYFDARNPDMNKCIKCKIEHCEACFSHNFCTKCKEGLYLHKGRCYPACPEGSSAANGTMECSSPAQCEMSEWSPWGPCSKKQQLCGFRRGSEERTRRVLHAPVGDHAACSDTKETRRCTVRRVPCPEGQKRRKGGQGRRENANRNLARKESKEAGAGSRRRKGQQQQQQQGTVGPLTSAGPA

SEQ ID NO: 11576 - protein, 263 aa, Homo Sapiens; identical to SEQ ID NO: 11575

SEQ ID NO: 11577 - protein, 200 aa, Homo Sapiens
MRLGLCVVALVLSWTHLTISSRGIKGKRQRRISAEGSQACAKGCELCSEVNGCLKCSPKLFILLERNDIRQVGVCLPSCPPGYFDARNPDMNKCIKCKIEHCEACFSHNFCTKCKEGLYLHKGRCYPACPEGSSAANGTMECSSPGQKRRKGGQGRRENANRNLARKESKEAGAGSRRRKGQQQQQQQGTVGPLTSAGPA

SEQ ID NO: 11578 - protein, 89 aa, Homo Sapiens
MDLASYVSNPICKGCLSCSKDNGCSRCQQKLFFFLRREGMRQYGECLHSCPSGYYGHRAPDMNRCARCRIENCDSCFSKDFCTKCKVGF

SEQ ID NO: 11579 - protein, 77 aa, Homo Sapiens
MQFRLFSFALIILNCMDYSHCQGNRWRRSKRASYVSNPICKGCLSCSKDNGCSRCQQKLFFFLRREGMRQYGECLHS

SEQ ID NO: 11580 - protein, 121 aa, Homo Sapiens
MQFRLFSFALIILNCMDYSHCQGNRWRRSKRASYVSNPICKGCLSCSKDNGCSRCQQKLFFFLRREGMRQYGECLHSCPSGYYGHRAPDMNRCARCRIENCDSCFSKDFCTKCKVGFYLHR

SEQ ID NO: 11581 - protein, 243 aa, Homo Sapiens
MQFRLFSFALIILNCMDYSHCQGNRWRRSKRASYVSNPICKGCLSCSKDNGCSRCQQKLFFFLRREGMRQYGECLHSCPSGYYGHRAPDMNRCARCRIENCDSCFSKDFCTKCKVGFYLHRGRCFDECPDGFAPLEETMECVEGCEVGHWSEWGTCSRNNRTCGFKWGLETRTRQIVKKPVKDTILCPTIAESRRCKMTMRHCPGGKRTPKAKEKRNKKKKRKLIERAQEQHSVFLATDRANQ

SEQ ID NO: 11582 - protein, 179 aa, Homo Sapiens
MQFRLFSFALIILNCMDYSHCQGNRWRRSKRGCRIENCDSCFSKDFCTKCKVGFYLHRGRCFDECPDGFAPLEETMECVGCEVGHWSEWGTCSRNNRTCGFKWGLETRTRQIVKKPVKDTILCPTIAESRRCKMTMRHCPGGKRTPKAKEKRNKKKKRKLIERAQEQHSVFLATDRANQ

SEQ ID NO: 11583 - protein, 89 aa, Homo Sapiens
MRQYGECLHSCPSGYYGHRAPDMNRCARCRIENCDSCFSKDFCTKCKVGFYLHRGRCFDECPDGFAPLEETMECVEGCEVGHWSEWGTC

SEQ ID NO: 11584 - protein, 168 aa, Homo Sapiens
MRQYGECLHSCPSGYYGHRAPDMNRCARCRIENCDSCFSKDFCTKCKVGFYLHRGRCFDECPDGFAPLEETMECVEGCEVGHWSEWGTCSRNNRTCGFKWGLETRTRQIVKKPVKDTILCPTIAESRRCKMTMRHCPGGKRTPKAKEKRNKKKKRKLIERAQEQHSVF

SEQ ID NO: 11585 - protein, 176 aa, Homo Sapiens
MRQYGECLHSCPSGYYGHRAPDMNRCARCRIENCDSCFSKDFCTKCKVGFYLHRGRCFDECPDGFAPLEETMECVEGCEVGHWSEWGTCSRNNRTCGFKWGLETRTRQIVKKPVKDTILCPTIAESRRCKMTMRHCPGGKRTPKAKEKRNKKKKRKLIERAQEQHSVFLATDRANQ

SEQ ID NO: 11586 - protein, 272 aa, Homo Sapiens
MHLRLISWLFIILNFMEYIGSQNASRGRRQRRMHPNVSQGCQGGCATCSDYNGCLSCKPRLFFALERIGMKQIGVCLSSCPSGYYGTRYPDINKCTKCKADCDTCFNKNFCTKCKSGFYLHLGKCLDNCPEGLEANNHTMECVSIVHCEVSEWNPWSPCTKKGKTCGFKRGTETRVREIIQHPSAKGNLCPPTNETRKCTVQRKKCQKGERGKKGRERKRKKPNKGESKEAIPDSKSLESSKEIPEQRENKQQQKKRKVQDKQKSVSVSTVH

SEQ ID NO: 11587 - protein, 292 aa, Homo Sapiens
MHLRLISWLFIILNFMEYIGSQNASRGRRQRRMHPNVSQGCQGGCATCSDYNGCLSCKPRLFFALERIGMKQIGVCLSSCPSGYYGTRYPDINKCTKCKADCDTCFNKNFCTKCKSGFYLHLGKCLDNCPEGLEANNHTMECVSIVHCEVSEWNPWSPCTKKGKTCGFKRGTETRVREIIQHPSAKGNLCPPTNETRKCTVQRKKCQKGERGKKGRERKRKKPNKGESKEAIPDSKSLESSKEIPEQRENKQQQKKRKVQDKQKSGIEVTLAEGLTSVSQRTQPTPCRRRYL

SEQ ID NO: 11588 - protein, 172 aa, Homo Sapiens
MRAPLCLLLLVAHAVDMLALNRRKKQVGTGLGGNCTGCIICSEENGCSTCQQRLFLFIRREGIRQYGKCLHDCPPGYFGIRGQEVNRCKKCGATCESCFSQDFCIRCKRQFYLYKGKCLPTCPPGTLAHQNTRECQERSPGQKKGRKDRRPRKDRKLDRRLDVRPRQPGLQP

SEQ ID NO: 11589 - protein, 234 aa, Homo Sapiens
MRAPLCLLLLVAHAVDMLALNRRKKQVGTGLGGNCTGCIICSEENGCSTCQQRLFLFIRREGIRQYGKCLHDCPPGYFGIRGQEVNRCKKCGATCESCFSQDFCIRCKRQFYLYKGKCLPTCPPGTLAHQNTRECQGECELGPWGGWSPCTHNGKTCGSAWGLESRVREAGRAGHEEAATCQVLSESRKCPIQRPCPGERSPGQKKGRKDRRPRKDRKLDRRLDVRPRQPGLQP

SEQ ID NO: 11590 - protein, 45 aa, Homo Sapiens
MITLHEMAETDEGWLDVVQSLIRVIPLEDPLGPAVITLLLDECPL

SEQ ID NO: 11591 - protein, 172 aa, Homo Sapiens
MIVFGWAVFLASRSLGQGLLLTLEEHIAHFLGTGGAATTMGNSCICRDDSGTDDSVDTQQQQAENSAVPTADTRSQPRDPVRPPRRGRGPHEPRRKKQNVDGLVLDTLAVIRTLVDKRKLQNEDAYIGPCFHKSSTGIVVSLPGISLSDQEPPYSMITLHEMAETDEGWLDV

SEQ ID NO: 11592 - protein, 121 aa, Homo Sapiens
MIVFGWAVFLASRSLGQGLLLTLEEHIAHFLGTGGAATTMGNSCICRDDSGTDDSVDTQQQQAENSAVPTADTRSQPRDPVRPPRRGRGPHEPRRKKQNVDGLVLDTLAVIRTLVDNDQEP

SEQ ID NO: 11593 - protein, 146 aa, Homo Sapiens
MIVFGWAVFLASRSLGQGLLLTLEEHIAHFLGTGGAATTMGNSCICRDDSGTDDSVDTQQQQAENSAVPTADTRSQPRDPVRPPRRGRGPHEPRRKKQNVDGLVLDTLAVIRTLVDNDQEPPYSMITLHEMAETDEGWLDVVQSLI

SEQ ID NO: 11594 - protein, 146 aa, Homo Sapiens; identical to SEQ ID NO: 11593

SEQ ID NO: 11595 - protein, 576 aa, Homo Sapiens
MIVFGWAVFLASRSLGQGLLLTLEEHIAHFLGTGGAATTMGNSCICRDDSGTDDSVDTQQQQAENSAVPTADTRSQPRDPVRPPRRGRGPHEPRRKKQNVDGLVLDTLAVIRTLVDNDQEPPYSMITLHEMAETDEGWLDVVQSLIRVIPLEDPLGPAVITLLLDECPLPTKDALQKLTEILNLNGEVACQDSSHPAKHRNTSAVLGCLAEKLAGPASIGLLSPGILEYLLQCLKLQSHPTVMLFALIALEKFAQTSENKLTISESSISDRLVTLESWANDPDYLKRQVGFCAQWSLDNLFLKEGRQLTYEKVNLSSIRAMLNSNDVSEYLKISPHGLEARCDASSFESVRCTFCVDAGVWYYEVTVVTSGVMQIGWATRDSKFLNHEGYGIGDDEYSCAYDGCRQLIWYNARSKPHIHPCWKEGDTVGFLLDLNEKQMIFFLNGNQLPPEKQVFSSTVSGFFAAASFMSYQQCEFNFGAKPFKYPPSMKFSTFNDYAFLTAEEKIILPRHRRLALLKQVSIRENCCSLCCDEVADTQLKPCGHSDLCMDCALQLETCPLCRKEIVSRIRQISHIS

SEQ ID NO: 11596 - protein, 576 aa, Homo Sapiens; identical to SEQ ID NO: 11595

SEQ ID NO: 11597 - protein, 239 aa, Homo Sapiens
MARQLLSQVDMDCRVHMRPIGLTWVLQLTLAWILLEACGGSRPLQARSQQHHGLAADLGKGKLHLAGPCCPSEMDTTETSGPGNHPERCGVPSPECESFLEHLQRALRSRFRLRLLGVRQAQPLCEELCQAWFANCEDDITCGPTWLPLSEKRGCEPSCLTYGQTFADGTDLCRSALGHALPVAAPGARHCFNISISAVPRPRPGRRGREAPSRRSRSPRTSILDAAGSGSGSGSGSGP

SEQ ID NO: 11598 - protein, 191 aa, Homo Sapiens
MARQVDMDCRVHMRPIGLTWVLQLTLAWILLEACGGSRPLQARSQQHHGLAADLGKGKLHLAGPCCPSEMDTTETSGPGNHPERCGVPSPECESFLEHLQRALRSRFRLRLLGVRQAQPLCEELCQAWFANCEDDITCGPTWLPLSEKRGCEPSCLTYGQTFADGTDLCRSALGHALPVAAPGARHCFNIS

SEQ ID NO: 11599 - protein, 70 aa, Homo Sapiens
MDCRVHMRPIGLTWVLQLTLAWILLEACGGSRPLQARSQQHHGLAADLGKGKLHLAEMDTTETSGPGNHP

SEQ ID NO: 11600 - protein, 193 aa, Homo Sapiens
MDCRVHMRPIGLTWVLQLTLAWILLEACGGSRPLQARSQQHHGLAADLGKGKLHLAEMDTTETSGPGNHPERCGVPSPECESFLEHLQRALRSRFRLRLLGVRQAQPLCEELCQAWFANCEDDITCGPTWLPLSEKRGCEPSCLTYGQTFADGTDLCRSALGHALPVAAPGARHCFNISISAVPRPRPGRRGR

SEQ ID NO: 11601 - protein, 174 aa, Homo Sapiens
MDCRVHMRPIGLTWVLQLTLAWILLEACGGSRPLQARSQQHHGLAADLGKGKLHLAGDPQASVPKPYLNIQDPSSQGSPLPGPCCPSEMDTTETSGPGNHPERCGVPSPECESFLEHLQRALRSRFRLRLLGVRQAQPLCEELCQAWFANCEDDITCGPTWLPLSEKRGCEPSC

SEQ ID NO: 11602 - protein, 130 aa, Homo Sapiens
MDCRVHMRPIGLTWVLQLTLAWILLEACGGSRPLQARSQQHHGLAADLGKGKLHLAGPCCPSEMDTTETSGPGNHPERCGVPSPECESFLEHLQRALRSRFRLRLLGVRQAQPLCEELCQAWFANCEDDI

SEQ ID NO: 11603 - protein, 186 aa, Homo Sapiens
MDCRVHMRPIGLTWVLQLTLAWILLEACGGSRPLQARSQQHHGLAADLGKGKLHLAGPCCPSEMDTTETSGPGNHPERCGVPSPECESFLEHLQRALRSRFRLRLLGVRQAQPLCEELCQAWFANCEDDITCGPTWLPLSEKRGCEPSCLTYGQTFADGTDLCRSALGHALPVAAPGARHCFNISI

SEQ ID NO: 11604 - protein, 214 aa, Homo Sapiens
MDCRVHMRPIGLTWVLQLTLAWILLEACGGSRPLQARSQQHHGLAADLGKGKLHLAGPCCPSEMDTTETSGPGNHPERCGVPSPECESFLEHLQRALRSRFRLRLLGVRQAQPLCEELCQAWFANCEDDITCGPTWLPLSEKRGCEPSCLTYGQTFADGTDLCRSALGHALPVAAPGARHCFNISISAVPRPRPGRRGREAPSRRSRSPRTSIL

SEQ ID NO: 11605 - protein, 229 aa, Homo Sapiens
MDCRVHMRPIGLTWVLQLTLAWILLEACGGSRPLQARSQQHHGLAADLGKGKLHLAGPCCPSEMDTTETSGPGNHPERCGVPSPECESFLEHLQRALRSRFRLRLLGVRQAQPLCEELCQAWFANCEDDITCGPTWLPLSEKRGCEPSCLTYGQTFADGTDLCRSALGHALPVAAPGARHCFNISISAVPRPRPGRRGREAPSRRSRSPRTSILDAAGSGSGSGSGSGP

SEQ ID NO: 11606 - protein, 229 aa, Homo Sapiens; identical to SEQ ID NO: 11605

SEQ ID NO: 11607 - protein, 114 aa, Homo Sapiens [sequence omitted]

SEQ ID NO: 11608 - protein, 205 aa, Homo Sapiens
MDEALETQLKTSRGRFSATESLPTLELLSQVDMDCRVHMRPIGLTWVLQLTLAWILLEACGGSRPLQARSQQHHGLAADLGKGKLHLAGPCCPSEMDTTETSGPGNHPERCGVPSPECESFLEHLQRALRSRFRLRLLGVRQAQPLCEELCQAWFANCEDDITCGPTWLPLSEKRGCEPSCLTYGQAGVQWRDLSSMQPPPPGFK

SEQ ID NO: 11609 - protein, 261 aa, Homo Sapiens
MDEALETQLKTSRGRFSATESLPTLELLSQVDMDCRVHMRPIGLTWVLQLTLAWILLEACGGSRPLQARSQQHHGLAADLGKGKLHLAGPCCPSEMDTTETSGPGNHPERCGVPSPECESFLEHLQRALRSRFRLRLLGVRQAQPLCEELCQAWFANCEDDITCGPTWLPLSEKRGCEPSCLTYGQTFADGTDLCRSALGHALPVAAPGARHCFNISISAVPRPRPGRRGREAPSRRSRSPRTSILDAAGSGSGSGSGSGP

SEQ ID NO: 11610 - protein, 441 aa, Homo Sapiens
MLRKGCCVELLLLLVAAELPLGGGCPRDCVCYPAPMTVSCQAHNFAAIPEGIPVDSERVFLQNNRIGLLQPGHFSPAMVTLWIYSNNITYIHPSTFEGFVHLEELDLGDNRQLRTLAPETFQGLVKLHALYLYKCGLSALPAGVFGGLHSLQYLYLQDNHIEYLQDDIFVDLVNLSHLFLHGNKLWSLGPGTFRGLVNLDRLLLHENQLQWVHHKAFHDLRRLTTLFLFNNSLSELQGECLAPLGALEFLRLNGNPWDCGCRARSLWEWLQRFRGSSSAVPCVSPGLRHGQDLKLLRAEDFRNCTGPASPHQIKSHTLTTTDRAARKEHHSPHGPTRSKGHPHGPRPGHRKPGKNCTNPRNRNQISKAGAGKQAPELPDYAPDYQHKFSFDIMPTARPKRKGKCARRTPIRAPSGVQQASSASSLGASLLAWTLGLAVTLR

SEQ ID NO: 11611 - protein, 420 aa, Homo Sapiens
MLPGLRRLLQAPASACLLLMLLALPLAAPSCPMLCTCYSSPPTVSCQANNFSSVPLSLPPSTQRLFLQNNLIRTLRPGTFGSNLLTLWLFSNNLSTIYPGTFRHLQALEELDLGDNRHLRSLEPDTFQGLERLQSLHLYRCQLSSLPGNIFRGLVSLQYLYLQENSLLHLQDDLFADLANLSHLFLHGNRLRLLTEHVFRGLGSLDRLLLHGNRLQGVHRAAFRGLSRLTILYLFNNSLASLPGEALADLPSLEFLRLNANPWACDCRARPLWAWFQRARVSSSDVTCATPPERQGRDLRALREADFQACPPAAPTRPGSRARGNSSSNHLYGVAEAGAPPADPSTLYRDLPAEDSRGRQGGDAPTEDDYWGGYGGEDQRGEQMCPGAACQAPPDSRGPALSAGLPSPLLCLLLLVPHHL

SEQ ID NO: 11612 - protein, 204 aa, Homo Sapiens
MLPGLRRLLQAPASACLLLMLLALPLAAPSCPMLCTCYSSPPTVSCQANNFSSVPLSLPPSTQRLFLQNNLIRTLRPGTFGSNLLTLWLFSNNLSTIYPGTFRHLQALEELDLGDNRHLRSLEPDTFQGLERLQSLHLYRCQLSSLPGNIFRGLVSLQYLYLQENSLLHLQGKKEKGKSLLCSWRMDALKMEGIPVIVIHCYYY

SEQ ID NO: 11613 - protein, 193 aa, Homo Sapiens
MLPGLRRLLQAPASACLLLMLLALPLAAPSCPMLCTCYSSPPTVSCQANNFSSVPLSLPPSTQRLFLQNNLIRTLRPGTFGSNLLTLWLFSNNLSTIYPGTFRHLQALEELDLGDNRHLRSLEPDTFQGLERLQSLHLYRCQLSSLPGNIFRGLVSLQYLYLQENSLLHLQGPLPKGLCSCFSHPPSSLPTSR

SEQ ID NO: 11614 - protein, 122 aa, Homo Sapiens
MKLLTGLVFCSLVLGVSSRSFFSFLGEAFDGARDMWRAYSDMREANYIGSDKYFHARGNYDAAKRGPGGAWAAEVITDARENIQRFFGHGAEDSLADQAANEWGRSGKDPNHFRPAGLPEKY

SEQ ID NO: 11615 - protein, 122 aa, Homo Sapiens; identical to SEQ ID NO: 11614

SEQ ID NO: 11616 - protein, 122 aa, Homo Sapiens; identical to SEQ ID NO: 11614

SEQ ID NO: 11617 - protein, 80 aa, Homo Sapiens
MKLLTGLVFCSLVLSVSSRSFFSFLGEAFDGARDMWRAYSDMREANYIGSDKYFHARGNYDAAKRGPGGAWAAEVIREDD

SEQ ID NO: 11618 - protein, 113 aa, Homo Sapiens
MKLLTGLVFCSLVLSVSSRSFFSFLGEAFDGARDMWRAYSDMREANYIGSDKYFHARGNYDAAKRGPGGAWAAEVIRLKCHGMIMAHCNLDLPGLKRSSHFSLLNNWDCRCAP

SEQ ID NO: 11619 - protein, 83 aa, Homo Sapiens
MKLLTGLVFCSLVLSVSSRSFFSFLGEAFDGARDMWRAYSDMREANYIGSDKYFHARGNYDAAKRGPGGAWAAEVISLFSAEL

SEQ ID NO: 11620 - protein, 122 aa, Homo Sapiens
MKLLTGLVFCSLVLSVSSRSFFSFLGEAFDGARDMWRAYSDMREANYIGSDKYFHARGNYDAAKRGPGGAWAAEVISNARENIQRLTGRGAEDSLADQAANKWGRSGRDPNHFRPAGLPEKY

SEQ ID NO: 11621 - protein, 122 aa, Homo Sapiens; identical to SEQ ID NO: 11620

SEQ ID NO: 11622 - protein, 122 aa, Homo Sapiens; identical to SEQ ID NO: 11620

SEQ ID NO: 11623 - protein, 130 aa, Homo Sapiens
MRLFTGIVFCSLVMGVTSESWRSFFKEALQGVGDMGRAYWDIMISNHQNSNRYLYARGNYDAAQRGPGGVWAAKLISRSRVYLQGLIDCYLFGNSSTVLEDSKSNEKAEEWGRSGKDPDRFRPDGLPKKY

SEQ ID NO: 11624 - protein, 220 aa, Homo Sapiens
MNGFTPDEMSRGGDAAAAVAAVVAAAAAAASAGNGTGAGTGAEVPGAGAVSAAGPPGAAGPGPGQLCCLREDGERCGRAAGNASFSKRIQKSISQKKVKIELDKSARHLYICDYHKNLIQSVRNRRKRKGSDDDGGDSPVQDIDTPEVDLYQLQVNTLRRYKRHFKLPTRPGLNKAQLVEIVGCHFRSIPVNEKDTLTYFIYSVKNDKNKSDLKVDSGVH

SEQ ID NO: 11625 - protein, 51 aa, Homo Sapiens
MSFIFEWIYNGFSSVLQFLGLYKKSGKLVFLGLDNAGKTTLLHMLKDDRLG

SEQ ID NO: 11626 - protein, 198 aa, Homo Sapiens
MSFIFEWIYNGFSSVLQFLGLYKKSGKLVFLGLDNAGKTTLLHMLKDDRLGQHVPTLHPTSEELTIAGMTFTTFDLGGHEQARRVWKNYLPAINGIVFLVDCADHSRLVESKVELNALMTDETISNVPILILGNKIDRTDAISEEKLREIFGLYGQTTGKGNVTLKELNARPMEVFMCSVLKRQGYGEGFRWLSQYID

SEQ ID NO: 11627 - protein, 198 aa, Homo Sapiens; identical to SEQ ID NO: 11626

SEQ ID NO: 11628 - protein, 198 aa, Homo Sapiens; identical to SEQ ID NO: 11626

SEQ ID NO: 11629 - protein, 198 aa, Homo Sapiens; identical to SEQ ID NO: 11626

SEQ ID NO: 11630 - protein, 121 aa, Homo Sapiens
MSFIFEWIYNGFSSVLQFLGLYKKSGKLVFLGLDNAGKTTLLHMLKDDRLGQHVPTLHPTSEELTIAGMTFTTFDLGGHEQARRVWKNYLPAINGIVFLVDCADHSRLVESKVELNVCFVL

SEQ ID NO: 11631 - protein, 115 aa, Homo Sapiens
  misc_feature (1)..(1): Xaa can be any naturally occurring amino acid
XSFWWTVQIILASWNPKLSLMIYCSSLLTLAPNALMTDETISNVPILILGNKIDRTDAISEEKLREIFGLYGQTTGKGNVTLKELNARPMEVFMCSVLKRQGYGEGFRWLSQYID

SEQ ID NO: 11632 - protein, 213 aa, Homo Sapiens
IAYKFGKTVVSCEGYESSEDQYVLRGSCGLEYNLDYTELGLQKLKESGKQHGFASFSDYYYKWSSADSCNMSGLITIVVLLGIAFVVYKLFLSDGQYSPPPYSEYPPFSHRYQRFTNSAGPPPPGFKSEFTGPQNTGHGATSGFGSAFTGQQGYENSGPGFWTGLGTGGILGYLFGSNRAYSPLHGGSGSYSVCSNSDTKTRTASGYGGTRRR

SEQ ID NO: 11633 - protein, 36 aa, Homo Sapiens
MAAACGPGAAGYCLLLGLHLFLLTAGPALGWIPSHS

SEQ ID NO: 11634 - protein, 147 aa, Homo Sapiens
MAAACGPGAAGYCLLLGLHLFLLTAGPALGWNDPALTLHYDRYTTSRRLDPIPQLKCVGGTAGCDSYTPKVIQCQNKGWDGYDVQWECKTDLDIAYKFGKTVVSCEGYESSEDQYVLRGSCGLEYNLDYTELGLQKLKESGKQHGFA

SEQ ID NO: 11635 - protein, 339 aa, Homo Sapiens
MAAACGPGAAGYCLLLGLHLFLLTAGPALGWNDPDRMLLRDVKALTLHYDRYTTSRRLDPIPQLKCVGGTAGCDSYTPKVIQCQNKGWDGYDVQWECKTDLDIAYKFGKTVVSCEGYESSEDQYVLRGSCGLEYNLDYTELGLQKLKESGKQHGFASFSDYYYKWSSADSCNMSGLITIVVLLGIAFVVYKLFLSDGQYSPPPYSEYPPFSHRYQRFTNSAGPPPPGFKSEFTGPQNTGHGATSGFGSAFTGQQGYENSGPGFWTGLGTGGILGYLFGSNRAATPFSDSWYYPSYPPSYPGTWNRAYSPLHGGSGSYSVCSNSDTKTRTASGYGGTRRR

SEQ ID NO: 11636 - protein, 40 aa, Homo Sapiens
MAAACGPGAAGYCLLLGLHLFLLTAGPALGWNDPECCCGM

SEQ ID NO: 11637 - protein, 37 aa, Homo Sapiens
MAAACGPGAAGYCLLLGLHLFLLTAGPALGWNDPVGM

SEQ ID NO: 11638 - protein, 37 aa, Homo Sapiens; identical to SEQ ID NO: 11637

SEQ ID NO: 11639 - protein, 202 aa, Homo Sapiens
MLLRDVKALTLHYDRYTTSRRLDPIPQLKCVGGTAGCDSYTPKVIQCQNKGWDGYDVQWECKTDLDIAYKFGKTVVSCEGYESSEDQYVLRGSCGLEYNLDYTELGLQKLKESGKQHGFASFSDYYYKWSSADSCNMSGLITIVVLLGIAFVVYKLFLSDGQYSPPPYSEYPPFSHRYQRFTNSAGPPPPGFKSEFTGPQNT

SEQ ID NO: 11640 - protein, 167 aa, Homo Sapiens
MSGLITIVVLLGIAFVVYKLFLSDGQYSPPPYSEYPPFSHRYQRFTNSAGPPPPGFKSEFTGPQNTGHGATSGFGSAFTGQQGYENSGPGFWTGLGTGGILGYLFGSNRAATPFSDSWYYPSYPPSYPGTWNRAYSPLHGGSGSYSVCSNSDTKTRTASGYGGTRRR

SEQ ID NO: 11641 - protein, 347 aa, Homo Sapiens
  misc_feature (1)..(1): Xaa can be any naturally occurring amino acid
XAAACGPGAAGYCLLLGLHLFLLTAGPALGWNDPDRMLLRDVKALTLHYDRYTTSRRLDPIPQLKCVGGTAGCDSYTPKVIQCQNKGWDGYDVQWECKTDLDIAYKFGKTVVSCEGYESSEDQYVLRGSCGLEYNLDYTELGLQKLKESGKQHGFASFSDYYYKWSSADSCNMSGLITIVVLLGIAFVVYKLFLSDGQYSPPPYSEYPPFSHRYQRFTNSAGPPPPGFKSEFTGPQNTGHGATSGFGSAFTGQQGYENSGPGFWTGLGTGGILGYLFGSNRAATPFSDSWYYPSYPPSYPGTWNRAYSPLHGGSGSYSDMVVPGDDKVESWSQTLDAEILDFSSLSL

SEQ ID NO: 11642 - protein, 218 aa, Homo Sapiens
  misc_feature (1)..(1): Xaa can be any naturally occurring amino acid
XLEYNLDYTELGLQKLKESGKQHGFASFSDYYYKWSSADSCNMSGLITIVVLLGIAFVVYKLFLSDGQYSPPPYSEYPPFSHRYQRFTNSAGPPPPGFKSEFTGPQNTGHGATSGFGSAFTGQQGYENSGPGFWTGLGTGGILGYLFGSNRAATPFSDSWYYPSYPPSYPGTWNRAYSPLHGGSGSYSVCSNSDTKTRTASGKSKKYKFLLPRSKVQK

SEQ ID NO: 11643 - protein, 724 aa, Homo Sapiens
MVLTLLLSAYKLCRFFAMSGPRPGAERLAVPGPDGGGGTGPWWAAGGRGPREVSPGAGTEVQDALERALPELQQALSALKQAGGARAVGAGLAEVFQLVEEAWLLPAVGREVAQGLCDAIRLDGGLDLLLRLLQAPELETRVQAARLLEQILVAENRDRVARIGLGVILNLAKEREPVELARSVAGILEHMFKHSEETCQRLVAAGGLDAVLYWCRRTDPALLRHCALALGNCALHGGQAVQRRMVEKRAAEWLFPLAFSKEDELLRLHACLAVAVLATNKEVEREVERSGTLALVEPLVASLDPGRFARCLVDASDTSQGRGPDDLQRLVPLLDSNRLEAQCIGAFYLCAEAAIKSLQGKTKVFSDIGAIQSLKRLVSYSTNGTKSALAKRALRLLGEEVPRPILPSVPSWKEAEVQTWLQQIGFSKYCESFREQQVDGDLLLRLTEEELQTDLGMKSGITRKRFFRELTELKTFANYSTCDRSNLADWLGSLDPRFRQYTYGLVSCGLDRSLLHRVSEQQLLEDCGIHLGVHRARILTAAREMLHSPLPCTGGKPSGDTPDVFISYRRNSGSQLASLLKVHLQLHGFSVFIDVEKLEAGKFEDKLIQSVMGARNFVLVLSPGALDKCMQDHDCKDWVHKEIVTALSCGKNIVPIIDGFEWPEPQVLPEDMQAVLTFNGIKWSHEYQEATIEKIIRFLQGRSSRDSSAGSDTSLEGAAPMGPT

SEQ ID NO: 11644 - protein, 107 aa, Homo Sapiens
  misc_feature (1)..(1): Xaa can be any naturally occurring amino acid
XASLLKVHLQLHGFSVFIDVEKLEAGKFEDKLIQSVMGARNFVLVLSPGALDKCMQDHDCKDWVHKEIVTALSCGKNIVPIIDGFEWPEPQVLPEDMQAVLTFNGIK

SEQ ID NO: 11645 - protein, 118 aa, Homo Sapiens
  misc_feature (1)..(1): Xaa can be any naturally occurring amino acid
XLLPQEQQVDGDLLLRLTEEELQTDLGMKSGITRKRFFRELTELKTFANYSTCDRSNLADWLGSLDPRFRQYTYGLVSCGLDRSLLHRVSEQQLLEDCGIHLGVHRARILTAARAITD

SEQ ID NO: 11646 - protein, 257 aa, Homo Sapiens
  misc_feature (1)..(1): Xaa can be any naturally occurring amino acid
XNLADWLGSLDPRFRQYTYGLVSCGLDRSLLHRVSEQQLLEDCGIHLGVHRARILTAARVSDAEGPPSPCCLLPTSEMLHSPLPCTGGKPSGDTPDVFISYRRNSGSQLASLLKVHLQLHGFSVFIDVEKLEAGKFEDKLIQSVMGARNFVLVLSPGALDKCMQDHDCKDWVHKEIVTALSCGKNIVPIIDGFEWPEPQVLPEDMQAVLTFNGIKWSHEYQEATIEKIIRFLQGRSSRDSSAGSDTSLEGAAPMGPT

SEQ ID NO: 11647 - protein, 8 aa, Homo Sapiens
MDHLNEAT

SEQ ID NO: 11648 - protein, 82 aa, Homo Sapiens
MDHLNEATQGKEHSEMSNNVSDPKGPPAKIARLEQNGSPLGRGRLGSTGAKMQGVPLKHSGHLMKTNLRKDIEIVYYEHQFG

SEQ ID NO: 11649 - protein, 71 aa, Homo Sapiens
MDHLNEATQGKEHSEMSNNVSDPKGPPAKIARLEQNGSPLGRGRLGSTGAKMQGVPLKHSGHLMKTNLRKG

SEQ ID NO: 11650 - protein, 116 aa, Homo Sapiens
MDHLNEATQGKEHSEMSNNVSDPKGPPAKIARLEQNGSPLGRGRLGSTGAKMQGVPLKHSGHLMKTNLRKGTMLPVFCVVEHYENAIEYDCKEEHAEFVLVRKDMLFNQLIEMALL

SEQ ID NO: 11651 - protein, 130 aa, Homo Sapiens
MDHLNEATQGKEHSEMSNNVSDPKGPPAKIARLEQNGSPLGRGRLGSTGAKMQGVPLKHSGHLMKTNLRKGTMLPVFCVVEHYENAIEYDCKEEHAEFVLVRKDMLFNQLIEMALLSLGYSHSSAAQAKG

SEQ ID NO: 11652 - protein, 166 aa, Homo Sapiens
MDHLNEATQGKEHSEMSNNVSDPKGPPAKIARLEQNGSPLGRGRLGSTGAKMQGVPLKHSGHLMKTNLRKGTMLPVFCVVEHYENAIEYDCKEEHAEFVLVRKDMLFNQLIEMALLSLGYSHSSAAQAKGLIQVGKWNPVPLSYVTDAPDATVADMLQDVYHVVTL

SEQ ID NO: 11653 - protein, 172 aa, Homo Sapiens
MDHLNEATQGKEHSEMSNNVSDPKGPPAKIARLEQNGSPLGRGRLGSTGAKMQGVPLKHSGHLMKTNLRKGTMLPVFCVVEHYENAIEYDCKEEHAEFVLVRKDMLFNQLIEMALLSLGYSHSSAAQAKGLIQVGKWNPVPLSYVTDAPDATVADMLQDVYHVVTLKIQLHR

SEQ ID NO: 11654 - protein, 224 aa, Homo Sapiens
MDHLNEATQGKEHSEMSNNVSDPKGPPAKIARLEQNGSPLGRGRLGSTGAKMQGVPLKHSGHLMKTNLRKGTMLPVFCVVEHYENAIEYDCKEEHAEFVLVRKDMLFNQLIEMALLSLGYSHSSAAQAKGLIQVGKWNPVPLSYVTDAPDATVADMLQDVYHVVTLKIQLHSCPKLEDLPPEQWSHTTVRNALKDLLKDMNQSSLAKECPLSQSMISSIVNSTY

SEQ ID NO: 11655 - protein, 763 aa, Homo Sapiens
MDHLNEATQGKEHSEMSNNVSDPKGPPAKIARLEQNGSPLGRGRLGSTGAKMQGVPLKHSGHLMKTNLRKGTMLPVFCVVEHYENAIEYDCKEEHAEFVLVRKDMLFNQLIEMALLSLGYSHSSAAQAKGLIQVGKWNPVPLSYVTDAPDATVADMLQDVYHVVTLKIQLHSCPKLEDLPPEQWSHTTVRNALKDLLKDMNQSSLAKECPLSQSMISSIVNSTYYANVSAAKCQEFGRWYKHFKKTKDMMVEMDSLSELSQQGANHVNFGQQPVPGNTAEQPPSPAQLSHGSQPSVRTPLPNLHPGLVSTPISPQLVNQQLVMAQLLNQQYAVNRLLAQQSLNQQYLNHPPPVSRSMNKPLEQQVSTNTEVSSEIYQWVRDELKRAGISQAVFARVAFNRTQGLLSEILRKEEDPKTASQSLLVNLRAMQNFLQLPEAERDRIYQDERERSLNAASAMGPAPLISTPPSRPPQVKTATIATERNGKPENNTMNINASIYDEIQQEMKRAKVSQALFAKVAATKSQGWLCELLRWKEDPSPENRTLWENLSMIRRFLSLPQPERDAIYEQESNAVHHHGDRPPHIIHVPAEQIQQQQQQQQQQQQQQQAPPPPQPQQQPQTGPRLPPRQPTVASPAESDEENRQKTRPRTKISVEALGILQSFIQDVGLYPDEEAIQTLSAQLDLPKYTIIKFFQNQRYYLKHHGKLKDNSGLEVDVAEYKEEELLKDLEESVQDKNTNTLFSVKLEEELSVEGNTDINTDLKD

SEQ ID NO: 11656 - protein, 763 aa, Homo Sapiens; identical to SEQ ID NO: 11655

SEQ ID NO: 11657 - protein, 795 aa, Homo Sapiens
MDHLNEATQGKEHSEMSNNVSDPKGPPAKIARLEQNGSPLGRGRLGSTGAKMQGVPLKHSGHLMKTNLRKGTMLPVFCVVEHYENAIEYDCKEEHAEFVLVRKDMLFNQLIEMALLSLGYSHSSAAQAKGLIQVGKWNPVPLSYVTDAPDATVADMLQDVYHVVTLKIQLHSCPKLEDLPPEQWSHTTVRNALKDLLKDMNQSSLAKECPLSQSMISSIVNSTYYANVSAAKCQEFGRWYKHFKKTKDMMVEMDSLSELSQQGANHVNFGQQPVPGNTAEQPPSPAQLSHGSQPSVRTPLPNLHPGLVSTPISPQLVNQQLVMAQLLNQQYAVNRLLAQQSLNQQYLNHPPPVSRSMNKPLEQQVSTNTEVSSEIYQWVRDELKRAGISQAVFARVAFNRTQGLLSEILRKEEDPKTASQSLLVNLRAMQNFLQLPEAERDRIYQDERERSLNAASAMGPAPLISTPPSRPPQVKTATIATERNGKPENNTMNINASIYDEIQQEMKRAKVSQALFAKVAATKSQGWLCELLRWKEDPSPENRTLWENLSMIRRFLSLPQPERDAIYEQESNAVHHHGDRPPHIIHVPAEQIQSPSPTTLGKGESRGVFLPGLPTPAPWLGAAPQQQQQQQQQQQQQQQAPPPPQPQQQPQTGPRLPPRQPTVASPAESDEENRQKTRPRTKISVEALGILQSFIQDVGLYPDEEAIQTLSAQLDLPKYTIIKFFQNQRYYLKHHGKLKDNSGLEVDVAEYKEEELLKDLEESVQDKNTNTLFSVKLEEELSVEGNTDINTDLKD

SEQ ID NO: 11658 - protein, 138 aa, Homo Sapiens
MLFNQLIEMALLSLGYSHSSAAQAKGLIQVGKWNPVPLSYVTDAPDATVADMLQDVYHVVTLKIQLHSCPKLEDLPPEQWSHTTVRNALKDLLKDMNQSSLAKECPLSQHPEISNMLDNLFINGKINFKKKLPRAPEA

SEQ ID NO: 11659 - protein, 166 aa, Homo Sapiens
MLPVFCVVEHYENAIEYDCKEEHAEFVLVRKDMLFNQLIEMALLSLGYSHSSAAQAKGLIQVGKWNPVPLSYVTDAPDATVADMLQDVYHVVTLKIQLHSCPKLEDLPPEQWSHTTVRNALKDLLKDMNQSSLAKECPLSQSMISSIVNSTYYANVSAAKCQEFGR

SEQ ID NO: 11660 - protein, 41 aa, Homo Sapiens
MGAKSMRSWCLCQICSCGFLSSQPDHIPIPVQAAVLWDPPD

SEQ ID NO: 11661 - protein, 29 aa, Homo Sapiens
MGAKSMRSWCLCQICSCGPGLTREPLPLP

SEQ ID NO: 11662 - protein, 398 aa, Homo Sapiens
MGAKSMRSWCLCQICSCGSDYCPYEIVKQPRHVPEEYKPKQGKIDLGTTYKRDLNSYKVQPVAIVRPLERQVKKGKLDTVPTYKDDYRAWDLHKSELYKPEQTYHPPTVKFGNSTTFQDDFVPQEIKPRQSFKPSSVVKRSTAPFNGITSHRLDYIPHQLELKFERPKEVYKPTDQRFEDLTTHRCDFQGLIGETAKLCRPVHTRVTQNALFEGSTEFRESFQPWEIPPPEVKKVPEYVPPTGSMLLNSTSHLDYVPYQANHVVPIRPVSQKRSNNFPFQGKSIMKEDFPAWESCRQGLIKKQQQIPNPSGKFDGLSTFRSHYVPHELIPTESCKPLNIAFKSSVPFDDVTMYSVEYTPKRQEICPASYPSPPGYIFDNTNSQGHKFFRKIIPAVKAF

SEQ ID NO: 11663 - protein, 30 aa, Homo Sapiens
MYDNVLPPQSLKAKQEIRACHGKMEGITTF

SEQ ID NO: 11664 - protein, 104 aa, Homo Sapiens
MYDNVLPPQSLKAKQEIRACHGKMEGITTFKSDYCPYEIVKQPRHVPEEYKPKQGKIDLGTTYKRDLNSYKVQPVAIVRPLERQVKKGKLDTVPTYKGNLLFHT

SEQ ID NO: 11665 - protein, 149 aa, Homo Sapiens
GWAASDDPIEKVIEGINRGLSNAEREVGKALDGINSGITHAGREVEKVFNGLSNMGSHTGKELDKGVQGLNHGMDKVAHEINHGIGQAGKEAEKLGHGVNNAAGQGNHQSGSSSHQGGATTTPLASGASVNTPFINLPALWRSVANIMP

SEQ ID NO: 11666 - protein, 247 aa, Homo Sapiens
MHLARLVGSCSLLLLLGALSGWAASDDPIEKVIEGINRGLSNAEREVGKALDGINSGITHAGREVEKVFNGLSNMGSHTGKELDKGVQGLNHGMDKVAHEINHGIGQAGKEAEKLGHGVNNAAGQAGKEADKAVQGFHTGVHQAGKEAEKLGQGVNHAADQAGKEVEKLGQGAHHAAGQAGKELQNAHNGVNQASKEANQLLNGNHQSGSSSHQGGATTTPLASGASVNTPFINLPALWRSVANIMP

SEQ ID NO: 11667 - protein, 590 aa, Homo Sapiens
MHLARLVGSCSLLLLLGALSGWAASDDPIEKVIEGINRGLSNAEREVGKALDGINSGITHAGREVEKVFNGLSNMGSHTGKELDKGVQGLNHGMDKVAHEINHGIGQAGKEAEKLGHGVNNAAGQVGKEADKLIHHGVHHGANQAGSEAGKFGQGVDNAAGQAGNEAGRFGQGVHHAAGQAGNEAGRFGQGVHHAAGQAGNEAGRFGQGAHHGLSEGWKETEKFGQGIHHAAGQVGKEAEKFGQGAHHAAGQAGNEAGRFGQGVHHGLSEGWKETEKFGQGVHHTAGQVGKEAEKFGQGAHHAAGQAGNEAGRFGQGAHHAAGQAGNEAGRFGQGVHHGLSEGWKETEKFGQGVHHAASQFGKETEKLGHGVHHGVNEAWKEAEKFGQGVHHAASQVGKEEDRVVQGLHHGVSQAGREAGQFGHDIHHTAGQAGKEGDIAVHGVQPGVHEAGKEAGQFGQGVHHTLEQAGKEADKAVQGFHTGVHQAGKEAEKLGQGVNHAADQAGKEVEKLGQGAHHAAGQAGKELQNAHNGVNQASKEANQLLNGNHQSGSSSHQGGATTTPLASGASVNTPFINLPALWRSVANIMP

SEQ ID NO: 11668 - protein, 264 aa, Homo Sapiens
MRTLWMALCALSRLWPGAQAGCAEAGRCCPGRDPACFARGWRLDRVYGTCFCDQACRFTGDCCFDYDRACPARPCFVGEWSPWSGCADQCKPTTRVRRRSVQQEPQNGGAPCPPLEERAGCLEYSTPQGQDCGHTYVPAFITTSAFNKERTRQATSPHWSTHTEDAGYCMEFKTESLTPHCALENWPLTRWMQYLREGYTVCVDCQPPAMNSVSLRCSGDGLDSDGNQTLHWQAIGNPRCQGTWKKVRRVDQCSCPAVHSFIFI

SEQ ID NO: 11669 - protein, 49 aa, Homo Sapiens
MGLGLLLPLLLLWTRGTQGSELDPKGQHVCVASRWVSWESDACGQQPLC

SEQ ID NO: 11670 - protein, 830 aa, Homo Sapiens
MGLGLLLPLLLLWTRGTQGSELDPKGQHVCVASSPSAELQCCAGWRQKDQECTIPICEGPDACQKDEVCVKPGLCRCKPGFFGAHCSSRCPGQYWGPDCRESCPCHPHGQCEPATGACQCQADRWGARCEFPCACGPHGRCDPATGVCHCEPGWWSSTCRRPCQCNTAAARCEQATGACVCKPGWWGRRCSFRCNCHGSPCEQDSGRCACRPGWWGPECQQQCECVRGRCSAASGECTCPPGFRGARCELPCPAGSHGVQCAHSCGRCKHNEPCSPDTGSCESCEPGWNGTQCQQPCLPGTFGESCEQQCPHCRHGEACEPDTGHCQRCDPGWLGPRCEDPCPTGTFGEDCGSTCPTCVQGSCDTVTGDCVCSAGYWGPSCNASCPAGFHGNNCSVPCECPEGLCHPVSGSCQPGSGSRDTALIAGSLVPLLLLFLGLACCACCCWAPRSDLKDRPARDGATVSRMKLQVWGTLTSLGSTLPCRSLSSHKLPWVTVSHHDPEVPFNHSFIEPPSAGWATDDSFSSDPESGEADEVPAYCVPPQEGMVPVAQAGSSEASLAAGAFPPPEDASTPFAIPRTSSLARAKRPSVSFAEGTKFAPQSRRSSGELSSPLRKPKRLSRGAQSGPEGREAEESTGPEEAEAPESFPAAASPGDSATGHRRPPLGGRTVAEHVEAIEGSVQESSGPVTTIYMLAGKPRGSEGPVRSVFRHFGSFQKGQAEAKVKRAIPKPPRQALNRKKGSPGLASGSVGQSPNSAPKAGLPGATGPMAVRPEEAVRGLGAGTESSRRAQEPVSGCGSPEQDPQKQAEEERQEEPEYENVVPISRPPEP

SEQ ID NO: 11671 - protein, 744 aa, Homo Sapiens
MGLGLLLPLLLLWTRGTQGSELDPKGQHVCVASSPSAELQCCAGWRQKDQECTIPICEGPDACQKDEVCVKPGLCRCKPGFFGAHCSSRCPGQYWGPDCRESCPCHPHGQCEPATGACQCQADRWGARCEFPCACGPHGRCDPATGVCHCEPGWWSSTCRRPCQCNTAAARCEQATGACVCKPGWWGRRCSFRCNCHGSPCEQDSGRCACRPGWWGPECQQQCECVRGRCSAASGECTCPPGFRGARCELPCPAGSHGVQCAHSCGRCKHNEPCSPDTGSCESCEPGWNGTQCQQPCLPGTFGESCEQQCPHCRHGEACEPDTGHCQPGSGSRDTALIAGSLVPLLLLFLGLACCACCCWAPRSDLKDRPARDGATVSRMKLQVWGTLTSLGSTLPCRSLSSHKLPWVTVSHHDPEVPFNHSFIEPPSAGWATDDSFSSDPESGEADEVPAYCVPPQEGMVPVAQAGSSEASLAAGAFPPPEDASTPFAIPRTSSLARAKRPSVSFAEGTKFAPQSRRSSGELSSPLRKPKRLSRGAQSGPEGREAEESTGPEEAEAPESFPAAASPGDSATGHRRPPLGGRTVAEHVEAIEGSVQESSGPVTTIYMLAGKPRGSEGPVRSVFRHFGSFQKGQAEAKVKRAIPKPPRQALNRKKGSPGLASGSVGQSPNSAPKAGLPGATGPMAVRPEEAVRGLGAGTESSRRAQEPVSGCGSPEQDPQKQAEEERQEEPEYENVVPISRPPEP

SEQ ID NO: 11672 - protein, 342 aa, Homo Sapiens
MGLGLLLPLLLLWTRGTQGSELDPKGQHVCVASSPSAELQCCAGWRQKDQECTIPICEGPDACQKDEVCVKPGLCRCKPGFFGAHCSSRCPGQYWGPDCRESCPCHPHGQCEPATGACQCQADRWGARCEFPCACGPHGRCDPATGVCHCEPGWWSSTCRRPCQCNTAAARCEQATGACVCKPGWWGRRCSFRCNCHGSPCEQDSGRCACRPGWWGPECQQQCECVRGRCSAASGECTCPPGFRGARCELPCPAGSHGVQCAHSCGRCKHNEPCSPDTGSCESCEPGWNGTQCQQPCLPGTFGESCEQQCPHCRHGEACEPDTGHCQRCDPGWLGPRGPVIL

SEQ ID NO: 11673 - protein, 569 aa, Homo Sapiens
MGLGLLLPLLLLWTRGTQGSELDPKGQHVCVASSPSAELQCCAGWRQKDQECTIPICEGPDACQKDEVCVKPGLCRCKPGFFGAHCSSRCPGQYWGPDCRESCPCHPHGQCEPATGACQCQADRWGARCEFPCACGPHGRCDPATGVCHCEPGWWSSTCRRPCQCNTAAARCEQATGACVCKPGWWGRRCSFRCNCHGSPCEQDSGRCACRPGWWGPECQQQCECVRGRCSAASGECTCPPGFRGARCELPCPAGSHGVQCAHSCGRCKHNEPCSPDTGSCESCEPGWNGTQCQQPCLPGTFGESCEQQCPHCRHGEACEPDTGHCQRCDPGWLGPRCEDPCPTGTFGEDCGSTCPTCVQGSCDTVTGDCVCSAGYWGPSCNASCPAGFHGNNCSVPCECPEGLCHPVSGSCQPGSGSRDTALIAGSLVPLLLLFLGLACCACCCWAPRSDLKDRPARDGATVSRMKLQVWGTLTSLGSTLPCRSLSSHKLPWVTASSSRPLPAGPLMTPSHPILSLERQMRFLPTVCHPKKGWSLWPRQGRQRPAWLQVLSRPLRTPPRHSPSRAPPA

SEQ ID NO: 11674 - protein, 125 aa, Homo Sapiens
MAEAKTHWLGAALSLIPLIFLISGAEAASFQRNQLLQKEPDLRLENVQKFPSPEMIRALEYIENLRQQAHKEESSPDYNPYQGVSVPLQQKENGDESHLPERDSLSEEDWMRIILEALRQAENEP

SEQ ID NO: 11675 - protein, 144 aa, Homo Sapiens
MAEAKTHWLGAALSLIPLIFLISGAEAASFQRNQLLQKEPDLRLENVQKFPSPEMIRALEYIENLRQQAHKEESSPDYNPYQGVSVPLQQKENGDESHLPERDSLSEEDWMRIILEALRQAENEPQSAPKENKPYALNSEKNFP

SEQ ID NO: 11676 - protein, 617 aa, Homo Sapiens
MAEAKTHWLGAALSLIPLIFLISGAEAASFQRNQLLQKEPDLRLENVQKFPSPEMIRALEYIENLRQQAHKEESSPDYNPYQGVSVPLQQKENGDESHLPERDSLSEEDWMRIILEALRQAENEPQSAPKENKPYALNSEKNFPMDMSDDYETQQWPERKLKHMQFPPMYEENSRDNPFKRTNEIVEEQYTPQSLATLESVFQELGKLTGPNNQKRERMDEEQKLYTDDEDDIYKANNIAYEDVVGGEDWNPVEEKIESQTQEEVRDSKENIEKNEQINDEMKRSGQLGIQEEDLRKESKDQLSDDVSKVIAYLKRLVNAAGSGRLQNGQNGERATRLFEKPLDSQSIYQLIEISRNLQIPPEDLIEMLKTGEKPNGSVEPERELDLPVDLDDISEADLDHPDLFQNRMLSKSGYPKTPGRAGTEALPDGLSVEDILNLLGMESAANQKTSYFPNPYNQEKVLPRLPYGAGRSRSNQLPKAAWIPHVENRQMAYENLNDKDQELGEYLARMLVKYPEIINSNQVKRVPGQGSSEDDLQEEEQIEQAIKEHLNQGSSQETDKLAPVSKRFPVGPPKNDDTPNRQYWDEDLLMKVLEYLNQEKAEKGREHIAKRAMENM

SEQ ID NO: 11677 - protein, 57 aa, Homo Sapiens
MAAIQDGLAKGENDETVSNTLTLTNGLERRTKTYSEDNFEELQYFPNFYALLKSIDS

SEQ ID NO: 11678 - protein, 236 aa, Homo Sapiens
MAAIQDGLAKGENDETVSNTLTLTNGLERRTKTYSEDNFEELQYFPNFYALLKSIDSEKEAKEKETLITIMKTLIDFVKMMVKYGTISPEEGVSYLENLDEMIALQTKNKLEKNATDNISKLFPAPSEKSHEETDSTKEEAAKMEKEYGSLKDSTKDDNSNPGGKTDEPKGKTEAYLEAIRKNIEWLKKHDKKGNKEDYDLSKMRDFINKQADAYVEKGILDKEEAEAIKRIYSSL

SEQ ID NO: 11679 - protein, 468 aa, Homo Sapiens
MGFLGTGTWILVLVLPIQAFPKPGGSQDKSLHNRELSAERPLNEQIAEAEEDKIKKTYPPENKPGQSNYSFVDNLNLLKAITEKEKIEKERQSIRSSPLDNKLNVEDVDSTKNRKLIDDYDSTKSGLDHKFQDDPDGLHQLDGTPLTAEDIVHKIAARIYEENDRAVFDKIVSKLLNLGLITESQAHTLEDEVAEVLQKLISKEANNYEEDPNKPTSWTENQAGKIPEKVTPMAAIQDGLAKGENDETVSNTLTLTNGLERRTKTYSEDNFEELQYFPNFYALLKSIDSEKEAKEKETLITIMKTLIDFVKMMVKYGTISPEEGVSYLENLDEMIALQTKNKLEKNATDNISKLFPAPSEKSHEETDSTKEEAAKMEKEYGSLKDSTKDDNSNPGGKTDEPKGKTEAYLEAIRKNIEWLKKHDKKGNKEDYDLSKMRDFINKQADAYVEKGILDKEEAEAIKRIYSSL

SEQ ID NO: 11680 - protein, 212 aa, Homo Sapiens
MVSRMVSTMLSGLLFWLASGWTPAFAYSPRTPDRVSEADIQRLLHGVMEQLGIARPRVEYPAHQAMNLVGPQSIEGGAHEGLQHLGPFGNIPNIVAELTGDNIPKDFSEDQGYPDPPNPCPVGKTADDGCLENTPDTAEFSREFQLHQHLFDPEHDYPGLGKWNKKLLYEKMKGGERRKRRSVNPYLQGQRLDNVVAKKSVPHFSDEDKDPE

SEQ ID NO: 11681 - protein, 194 aa, Homo Sapiens
MVSRMVSTMLSGLLFWLASGWTPAFAYSPRTPDRVSEADIQRLLHGVMEQLGIARPRVEYPAHQAMNLVGPQSIEGGAHEGLQHLGPFGNIPNIVAELTGDNIPKDFSEDQGYPDPPNPCPVGKTADDGCLENTPDTAEFSREFQLHQHLFDPEHDYPGLGKWSVNPYLQGQRLDNVVAKKSVPHFSDEDKDPE

SEQ ID NO: 11682 - protein, 211 aa, Homo Sapiens
MVSRMVSTMLSGLLFWLASGWTPAFAYSPRTPDRVSEADIQRLLHGVMEQLGIARPRVEYPAHQAMNLVGPQSIEGGAHEGLQHLGPFGNIPNIVAELTGDNIPKDFSEDQGYPDPPNPCPVGKTDDGCLENTPDTAEFSREFQLHQHLFDPEHDYPGLGKWNKKLLYEKMKGGERRKRRSVNPYLQGQRLDNVVAKKSVPHFSDEDKDPE

SEQ ID NO: 11683 - protein, 193 aa, Homo Sapiens
MVSRMVSTMLSGLLFWLASGWTPAFAYSPRTPDRVSEADIQRLLHGVMEQLGIARPRVEYPAHQAMNLVGPQSIEGGAHEGLQHLGPFGNIPNIVAELTGDNIPKDFSEDQGYPDPPNPCPVGKTDDGCLENTPDTAEFSREFQLHQHLFDPEHDYPGLGKWSVNPYLQGQRLDNVVAKKSVPHFSDEDKDPE

SEQ ID NO: 11684 - protein, 216 aa, Homo Sapiens
SGLLFWLASGWTPAFAYSPRTPDRVSEADIQRLLHGVMEQLGIARPRVEYPAHQAMNLVGPQSIEGGAHEGLQHLGPFGNIPNIVAELTGDNIPKDFSEDQGYPDPPNPCPVGKTADDGCLENTPDTAEFSREFQLHQHLFDPEHDYPGLGKWNKKLLYEKMKGGERRKRRVTRAWLDCCGDAWSFLSGAVNRLKPSLVGKSQNPPLCSPEKHWSM

SEQ ID NO: 11685 - protein, 56 aa, Homo Sapiens
MDTPSSYEAAMELFSPDQDMREAGAQLKKLVDTLPQKPRESIIKLMEKIAQSSLCN

SEQ ID NO: 11686 - protein, 91 aa, Homo Sapiens
MKLAVTLTLVTLALCCSSASAEICPSFQRVIETLLMDTPSSYEAAMELFSPDQDMREAGAQLKKLVDTLPQKPRESIIKLMEKIAQSSLCN

SEQ ID NO: 11687 - protein, 95 aa, Homo Sapiens
MKGSRALLLVALTLFCICRMATGEDNDEFFMDFLQTLLVGTPEELYEGTLGKYNVNEDAKAAMTELKSCIDGLQPMHKAELVKLLVQVLGSQDGA

SEQ ID NO: 11688 - protein, 95 aa, Homo Sapiens
MKGSRALLLVALTLFCICRMATGEDNDEFFMDFLQTLLVGTPEELYEGTLGKYNVNEDAKAAMTELKSCRDGLQPMHKAELVKLLVQVLGSQDGA

SEQ ID NO: 11689 - protein, 90 aa, Homo Sapiens
MRLSVCLLLLTLALCCYRANAVVCQALGSEITGFLLAGKPVFKFQLAKFKAPLEAVAAKMEVKKCVDTMAYEKRVLITKTLGKIAEKCDR

SEQ ID NO: 11690 - protein, 90 aa, Homo Sapiens
MKLSVCLLLVTLALCCYQANAEFCPALVSELLDFFFISEPLFKLSLAKFDAPPEAVAAKLGVKRCTDQMSLQKRSLIAEVLVKILKKCSV

SEQ ID NO: 11691 - protein, 83 aa, Homo Sapiens
MRLSVCLLMVSLALCCYQAHALVCPAVASEITVFLFLSDAAVNLQVAKLNPPPEALAAKLEVKHCTDQISFKKRLSLKKSWWK

SEQ ID NO: 11692 - protein, 95 aa, Homo Sapiens
MKLLMVLMLAALLLHCYADSGCKLLEDMVEKTINSDISIPEYKELLQEFIDSDAAAEAMGKFKQCFLNQSHRTLKNFGLMMHTVYDSIWCNMKSN

SEQ ID NO: 11693 - protein, 93 aa, Homo Sapiens
MKLLMVLMLAALSQHCYAGSGCPLLENVISKTINPQVSKTEYKELLQEFIDDNATTNAIDELKECFLNQTDETLSNVEVFMQLIYDSSLCDLF

SEQ ID NO: 11694 - protein, 120 aa, Homo Sapiens
MKLLMVLMLAALSQHCYAGSGCPLLENVISKTINPQVSKTEYKELLQEFIDDNATTNAIDELKECFLNQTDETLSNVEVFMVISFSSYKLFKSPDQGQVGSSFLTDNAKATSEQAFSYIG

SEQ ID NO: 11695 - protein, 96 aa, Homo Sapiens
MRVTSATCALLLALICSVQLGDACLDIDKLLANVVFDVSQDLLKEELARYNPSPLTEESFLNVQQCFANVSVTERFAHSVVIKKILQSNDCIEAAF

SEQ ID NO: 11696 - protein, 96 aa, Homo Sapiens; identical to SEQ ID NO: 11695

SEQ ID NO: 11697 - protein, 104 aa, Homo Sapiens
MKLAALLGLCVALSCSSAAAFLVGSAKPVAQPVAALESAAEAGAGTLANPLGTLNPLKLLLSSLGIPVNHLIEGSQKCVAELGPQAVGAVKALKALLGALTVFG

SEQ ID NO: 11698 - protein, 48 aa, Homo Sapiens
MDPLKLLLKTLGISVEHLVEGLRKCVNELGPEASEAVKKLLEALSHLV

SEQ ID NO: 11699 - protein, 93 aa, Homo Sapiens
MKLVTIFLLVTISLCSYSATAFLINKVPLPVDKLAPLPLDNILPFMDPLKLLLKTLGISVEHLVEGLRKCVNELGPEASEAVKKLLEALSHLV

SEQ ID NO: 11700 - protein, 218 aa, Homo Sapiens
MGRLLALVVGAALVSSACGGCVEVDSETEAVYGMTFKILCISCKRRSETNAETFTEWTFRQKGTEEFVKILRYENEVLQLEEDERFEGRVVWNGSRGTKDLQDLSIFITNVTYNHSGDYECHVYRLLFFENYEHNTSVVKKIHIEVVDKANRDMASIVSEIMMYVLIVVLTIWLVAEMIYCYKKIAAATETAAQENASEYLAITSESKENCTGVQVAE

SEQ ID NO: 11701 - protein, 218 aa, Homo Sapiens; identical to SEQ ID NO: 11700

SEQ ID NO: 11702 - protein, 268 aa, Homo Sapiens
MGRLLALVVGAALVSSACGGCVEVDSETEAVYGMTFKILCISCKRRSETNAETFTEWTFRQKGTEEFVKILRYENEVLQLEEDERFEGRVVWNGSRGTKDLQDLSIFITNVTYNHSGDYECHVYRLLFFENYEHNTSVVKKIHIEVVDKGESGAACPFTVTHRRARWRDRWQAVDRTGWLCAWPANRPQQRAEGEGSSPSCPLQLWPLFLSSPRRGQSMPVPHRRSGYRTQLCHLCCMTSGRCLLSLSQRVVLGLPGIIIRCVSRGVV

SEQ ID NO: 11703 - protein, 147 aa, Homo Sapiens
MGRLLALVVGAALVSSACGGCVEVDSETEAVYGMTFKILCISCKRRSETNAETFTEWTFRQKGTEEFVKKIHIEVVDKANRDMASIVSEIMMYVLIVVLTIWLVAEMIYCYKKIAAATETAAQENASEYLAITSESKENCTGVQVAE

SEQ ID NO: 11704 - protein, 185 aa, Homo Sapiens
MTFKILCISCKRRSETNAETFTEWTFRQKGTEEFVKILRYENEVLQLEEDERFEGRVVWNGSRGTKDLQDLSIFITNVTYNHSGDYECHVYRLLFFENYEHNTSVVKKIHIEVVDKANRDMASIVSEIMMYVLIVVLTIWLVAEMIYCYKKIAAATETAAQENASEYLAITSESKENCTGVQVAE

SEQ ID NO: 11705 - protein, 235 aa, Homo Sapiens
MTFKILCISCKRRSETNAETFTEWTFRQKGTEEFVKILRYENEVLQLEEDERFEGRVVWNGSRGTKDLQDLSIFITNVTYNHSGDYECHVYRLLFFENYEHNTSVVKKIHIEVVDKGESGAACPFTVTHRRARWRDRWQAVDRTGWLCAWPANRPQQRAEGEGSSPSCPLQLWPLFLSSPRRGQSMPVPHRRSGYRTQLCHLCCMTSGRCLLSLSQRVVLGLPGIIIRCVSRGVV

SEQ ID NO: 11706 - protein, 93 aa, Homo Sapiens
MPAFNRLFPLASLVLIYWVSVCFPVCVEVPSETEAVQGNPMKLRCISCMKREEVEATTVVEWFYRPEGGKDFLIYEYRNGHQEVESPFQGRLQ

SEQ ID NO: 11707 - protein, 141 aa, Homo Sapiens
MPAFNRLFPLASLVLIYWVSVCFPVCVEVPSETEAVQGNPMKLRCISCMKREEVEATTVVEWFYRPEGGKDFLIYEYRNGHQEVESPFQGRLQWNGSKDLQDVSITVLNVTLNDSGLYTCNVSREFEFEAHRPFVKTTRLI

SEQ ID NO: 11708 - protein, 215 aa, Homo Sapiens
MPAFNRLFPLASLVLIYWVSVCFPVCVEVPSETEAVQGNPMKLRCISCMKREEVEATTVVEWFYRPEGGKDFLIYEYRNGHQEVESPFQGRLQWNGSKDLQDVSITVLNVTLNDSGLYTCNVSREFEFEAHRPFVKTTRLIPLRVTEEAGEDFTSVVSEIMMYILLVFLTLWLLIEMIYCYRKVSKAEEAAQENASDYLAIPSENKENSAVPVEE

SEQ ID NO: 11709 - protein, 215 aa, Homo Sapiens; identical to SEQ ID NO: 11708

SEQ ID NO: 11710 - protein, 215 aa, Homo Sapiens; identical to SEQ ID NO: 11708

SEQ ID NO: 11711 - protein, 147 aa, Homo Sapiens
MELALRRSPVPRWLLLLPLLLGLNAGAVIDWPTEEGKEVWDYVTVRKDAYMFWWLYYATNSCKNFSELPLVMWLQGGPGGSSTGFGNFEEIGPFSEGPSSATLRGLPWVIPGSPLLIRCSPGDLTCTACLFSKTKVWQRCLRLQSKY

SEQ ID NO: 11712 - protein, 147 aa, Homo Sapiens; identical to SEQ ID NO: 11711

SEQ ID NO: 11713 - protein, 452 aa, Homo Sapiens
MELALRRSPVPRWLLLLPLLLGLNAGAVIDWPTEEGKEVWDYVTVRKDAYMFWWLYYATNSCKNFSELPLVMWLQGGPGGSSTGFGNFEEIGPLDSDLKPRKTTWLQAASLLFVDNPVGTGFSYVNGSGAYAKDLAMVASDMMVLLKTFFSCHKEFQTVPFYIFSESYGGKMAAGIGLELYKAIQRGTIKCNFAGVALGDSWISPVDSVLSWGPYLYSMSLLEDKGLAEVSKVAEQVLNAVNKGLYREATELWGKAEMIIEQNTDGVNFYNILTKSTPTSTMESSLEFTQSHLVCLCQRHVRHLQRDALSQLMNGPIRKKLKIIPEDQSWGGQATNVFVNMEEDFMKPVISIVDELLEAGINVTVYNGQLDLIVDTMGQEAWVRKLKWPELPKFSQLKWKALYSDPKSLETSAFVKSYKNLAFYWILKAGHMVPSDQGDMALKMMRLVTQQE

SEQ ID NO: 11714 - protein, 296 aa, Homo Sapiens
MELALRRSPVPRWLLLLPLLLGLNAGAVIDWPTEEGKEVWDYVTVRKDAYMFWWLYYATNSCKNFSELPLVMWLQGGPGGSSTGFGNFEEIGPLDSDLKPRKTTWLQAASLLFVDNPVGTGFSYVNGSGAYAKDLAMVASDMMVLLKTFFSCHKEFQTVPFYIFSESYGGKMAAGIGLELYKAIQRGTIKCNFAGVALGDSWISPVDSVLSWGPYLYSMSLLEDKGLAEVSKVAEQVLNAVNKGLYREATELWGKAEMIIEQNTDGVNFYNILTKSTPTSTMESSLEFTQSHLVWF

SEQ ID NO: 11715 - protein, 176 aa, Homo Sapiens
MELALRRSPVPRWLLLLPLLLGLNAGAVIDWPTEEGKEVWDYVTVRKDAYMFWWLYYATNSCKNFSELPLVMWLQLQAASLLFVDNPVGTGFSYVNGSGAYAKDLAMVASDMMVLLKTFFSCHKEFQTVPFYIFSESYGGKMAAGIGLELYKAIQRGTIKCNFAGVALGDSWISPV

SEQ ID NO: 11716 - protein, 69 aa, Homo Sapiens
MELALRRSPVPRWLLLLPLLLGLNAGSMGLCDGPQGCLHVLVALLCHQLLQELLRTAPGHVASGRSRRF

SEQ ID NO: 11717 - protein, 95 aa, Homo Sapiens
MVASDMMVLLKTFFSCHKEFQTVPFYIFSESYGGKMAAGIGLELYKAIQRGTIKCNFAGVALGDSWISPVDSVLSWGPYLYSMSLLEDKGLAEVS

SEQ ID NO: 11718 - protein, 135 aa, Homo Sapiens
  misc_feature (1)..(1): Xaa can be any naturally occurring amino acid
XTMESSLEFTQSHLGQATNVFVNMEEDFMKPVISIVDELLEAGINVTVYNGQLDLIVDTMGQEAWVRKLKWPELPKFSQLKWKALYSDPKSLETSAFVKSYKNLAFYWILKAGHMVPSDQGDMALKMMRLVTQQE

SEQ ID NO: 11719 - protein, 92 aa, Homo Sapiens
MKLMVLVFTIGLTLLLGVQAMPANRLSCYRKILKDHNCHNLPEGVADLTQIDVNVQDHFWDGKGCEMICYCNFSELLCCPKCHHIFILLRNL

SEQ ID NO: 11720 - protein, 98 aa, Homo Sapiens
MKLMVLVFTIGLTLLLGVQAMPANRLSCYRKILKDHNCHNLPEGVADLTQIDVNVQDHFWDGKGCEMICYCNFSELLCCPKDVFFGPKISFVIPCNNQ

SEQ ID NO: 11721 - protein, 121 aa, Homo Sapiens
MAPRPLLLLLLLLGGSAARPAPPRARRHSDGTFTSELSRLREGARLQRLLQGLVGKRSEQDAENSMAWTRLSAGLLCPSGSNMPILQAWMPLDGTWSPWLPPGPMVSEPAGAAAEGTLRPR

SEQ ID NO: 11722 - protein, 347 aa, Homo Sapiens
MGAAAVRWHLCVLLALGTRGRLAGGSGLPGSVDVDECSEGTDDCHIDAICQNTPKSYKCLCKPGYKGEGKQCEDIDECENDYYNGGCVHECINIPGNYRCTCFDGFMLAHDGHNCLDVDECQDNNGGCQQICVNAMGSYECQCHSGFFLSDNQHTCIHRSNEGMNCMNKDHGCAHICRETPKGGVACDCRPGFDLAQNQKDCTLTCNYGNGGCQHSCEDTDTGPTCGCHQKYALHSDGRTCIEKDEAAIERSQFNATSVADVDKRVKRRLLMETCAVNNGGCDRTCKDTATGVRCSCPVGFTLQPDGKTCKGQHVELCGCPCLYWPGQEPPCACIAGPRAGLNGGHV

SEQ ID NO: 11723 - protein, 988 aa, Homo Sapiens
MGAAAVRWHLCVLLALGTRGRLAGGSGLPGSVDVDECSEGTDDCHIDAICQNTPKSYKCLCKPGYKGEGKQCEDIDECENDYYNGGCVHECINIPGNYRCTCFDGFMLAHDGHNCLDVDECQDNNGGCQQICVNAMGSYECQCHSGFFLSDNQHTCIHRSNEGMNCMNKDHGCAHICRETPKGGVACDCRPGFDLAQNQKDCTLTCNYGNGGCQHSCEDTDTGPTCGCHQKYALHSDGRTCIETCAVNNGGCDRTCKDTATGVRCSCPVGFTLQPDGKTCKDINECLVNNGGCDHFCRNTVGSFECGCRKGYKLLTDERTCQDIDECSFERTCDHICINSPGSFQCLCHRGYILYGTTHCGDVDECSMSNGSCDQGCVNTKGSYECVCPPGRRLHWNGKDCVETGKCLSRAKTSPRAQLSCSKAGGVESCFLSCPAHTLFVPDSENSYVLSCGVPGPQGKALQKRNGTSSGLGPSCSDAPTTPIKQKARFKIRDAKCHLRPHSQARAKETARQPLLDHCHVTFVTLKCDSSKKRRRGRKSPSKEVSHITAEFEIETKMEEASDTCEADCLRKRAEQSLQAAIKTLRKSIGRQQFYVQVSGTEYEVAQRPAKALEGQGACGAGQVLQDSKCVACGPGTHFGGELGQCVSCMPGTYQDMEGQLSCTPCPSSDGLGLPGARNVSECGGQCSPGFFSADGFKPCQACPVGTYQPEPGRTGCFPCGGGLLTKHEGTTSFQDCEAKVHCSPGHHYNTTTHRCIRCPVGTYQPEFGQNHCITCPGNTSTDFDGSTNVTHCKNQHCGGELGDYTGYIESPNYPGDYPANAECVWHIAPPPKRRILIVVPEIFLPIEDECGDVLVMRKSASPTSITTYETCQTYERPIAFTSRSRKLWIQFKSNEGNSGKGFQVPYVTYDEDYQQLIEDIVRDGRLYASENHQEILKDKKLIKALFDVLAHPQNYFKYTAQESKEMFPRSFIKLLRSKVSRFLRPYK

SEQ ID NO: 11724 - protein, 363 aa, Homo Sapiens [sequence omitted]

SEQ ID NO: 11725 - protein, 175 aa, Homo Sapiens
  misc_feature (1)..(1): Xaa can be any naturally occurring amino acid
XRETPKGGVACDCRPGFDLAQNQKDCTLTCNYGNGGCQHSCEDTDTGPTCGCHQKYALHSDGRTCIEKDEAAIERSQFNATSVADVDKRVKRRLLMETCAVNNGGCDRTCKDTATGVRCSCPVGFTLQPDGKTCKDINECLVNNGGCDHFCRNTVGSFECGCRKGYKLLTDERTC

SEQ ID NO: 11726 - protein, 999 aa, Homo Sapiens
MGVAGRNRPGAAWAVLLLLLLLPPLLLLAGAVPPGRGRAAGPQEDVDECAQGLDDCHADALCQNTPTSYKCSCKPGYQGEGRQCEDIDECGNELNGGCVHDCLNIPGNYRCTCFDGFMLAHDGHNCLDVDECLENNGGCQHTCVNVMGSYECCCKEGFFLSDNQHTCIHRSEEGLSCMNKDHGCSHICKEAPRGSVACECRPGFELAKNQRDCILTCNHGNGGCQHSCDDTADGPECSCHPQYKMHTDGRSCLEREDTVLEVTESNTTSVVDGDKRVKRRLLMETCAVNNGGCDRTCKDTSTGVHCSCPVGFTLQLDGKTCKDIDECQTRNGGCDHFCKNIVGSFDCGCKKGFKLLTDEKSCQDVDECSLDRTCDHSCINHPGTFACACNRGYTLYGFTHCGDTNECSINNGGCQQVCVNTVGSYECQCHPGYKLHWNKKDCVEVKGLLPTSVSPRVSLHCGKSGGGDGCFLRCHSGIHLSSDVTTIRTSVTFKLNEGKCSLKNAELFPEGLRPALPEKHSSVKESFRYVNLTCSSGKQVPGAPGRPSTPKEMFITVEFELETNQKEVTASCDLSCIVKRTEKRLRKAIRTLRKAVHREQFHLQLSGMNLDVAKKPPRTSERQAESCGVGQGHAENQCVSCRAGTYYDGARERCILCPNGTFQNEEGQMTCEPCPRPGNSGALKTPEAWNMSECGGLCQPGEYSADGFAPCQLCALGTFQPEAGRTSCFPCGGGLATKHQGATSFQDCETRVQCSPGHFYNTTTHRCIRCPVGTYQPEFGKNNCVSCPGNTTTDFDGSTNITQCKNRRCGGELGDFTGYIESPNYPGNYPANTECTWTINPPPKRRILIVVPEIFLPIEDDCGDYLVMRKTSSSNSVTTYETCQTYERPIAFTSRSKKLWIQFKSNEGNSARGFQVPYVTYDEDYQELIEDIVRDGRLYASENHQEILKDKKLIKALFDVLAHPQNYFKYTAQESREMFPRSFIRLLRSKVSRFLRPYK

SEQ ID NO: 11727 - protein, 807 aa, Homo Sapiens
MGVAGRNRPGAAWAVLLLLLLLPPLLLLAGAVPPGRGRAAGPQEDVDECAQGLDDCHADALCQNTPTSYKCSCKPGYQGEGRQCEDIDECGNELNGGCVHDCLNIPGNYRCTCFDGFMLAHDGHNCLDVDECLENNGGCQHTCVNVMGSYECCCKEGFFLSDNQHTCIHRSEEGLSCMNKDHGCSHICKEAPRGSVACECRPGFELAKNQRDCILTCNHGNGGCQHSCDDTADGPECSCHPQYKMHTDGRSCLEREDTVLEVTESNTTSVVDGDKRVKRRLLMETCAVNNGGCDRTCKDTSTGVHCSCPVGFTLQLDGKTCKDIDECQTRNGGCDHFCKNIVGSFDCGCKKGFKLLTDEKSCQDVDECSLDRTCDHSCINHPGTFACACNRGYTLYGFTHCGDTNECSINNGGCQQVCVNTVGSYECQCHPGYKLHWNKKDCVASCDLSCIVKRTEKRLRKAIRTLRKAVHREQFHLQLSGMNLDVAKKPPRTSERQAESCGVGQGHAENQCVSCRAGTYYDGARERCILCPNGTFQNEEGQMTCEPCPRPGNSGALKTPEAWNMSECGGLCQPGEYSADGFAPCQLCALGTFQPEAGRTSCFPCGGGLATKHQGATSFQDCETRVQCSPGHFYNTTTHRCIRCPVGTYQPEFGKNNCVSCPGNTTTDFDGSTNITQCKTSSNSVTTYETCQTYERPIAFTSRSKKLWIQFKSNEGNSARGFQVPYVTYDEDYQELIEDIVRDGRLYASENHQEILKDKKLIKALFDVLAHPQNYFKYTAQESREMFPRSFIRLLRSKVSRFLRPYK

SEQ ID NO: 11728 - protein, 971 aa, Homo Sapiens
MGVAGRNRPGAAWAVLLLLLLLPPLLLLAGAVPPGRGRAAGPQEDVDECAQGLDDCHADALCQNTPTSYKCSCKPGYQGEGRQCEDIDECGNELNGGCVHDCLNIPGNYRCTCFDGFMLAHDGHNCLDVDECLENNGGCQHTCVNVMGSYECCCKEGFFLSDNQHTCIHRSEEGLSCMNKDHGCSHICKEAPRGSVACECRPGFELAKNQRDCILTCNHGNGGCQHSCDDTADGPECSCHPQYKMHTDGRSCLEREDTVLEVTESNTTSVVDGDKRVKRRLLMETCAVNNGGCDRTCKDTSTGVHCSCPVGFTLQLDGKTCKDIDECQTRNGGCDHFCKNIVGSFDCGCKKGFKLLTDEKSCQDVDECSLDRTCDHSCINHPGTFACACNRGYTLYGFTHCGDTNECSINNGGCQQVCVNTVGSYECQCHPGYKLHWNKKDCVEVKGLLPTSVSPRVSLHCGKSGGGDGCFLRCHSGIHLSSGLQGAYSVTCGSSSPLRNKQQKSNDSAFGDVTTIRTSVTFKLNEGKCSLKNAELFPEGLRPALPEKHSSVKESFRYVNLTCSSGKQVPGAPGRPSTPKEMFITVEFELETNQKEVTASCDLSCIVKRTEKRLRKAIRTLRKAVHREQFHLQLSGMNLDVAKKPPRTSERQAESCGVGQGHAENQCGLCQPGEYSADGFAPCQLCALGTFQPEAGRTSCFPCGGGLATKHQGATSFQDCETRVQCSPGHFYNTTTHRCIRCPVGTYQPEFGKNNCVSCPGNTTTDFDGSTNITQCKNRRCGGELGDFTGYIESPNYPGNYPANTECTWTINPPPKRRILIVVPEIFLPIEDDCGDYLVMRKTSSSNSVTTYETCQTYERPIAFTSRSKKLWIQFKSNEGNSARGFQVPYVTYDEDYQELIEDIVRDGRLYASENHQEILKDKKLIKALFDVLAHPQNYFKYTAQESREMFPRSFIRLLRSKVSRFLRPYK

SEQ ID NO: 11729 - protein, 172 aa, Homo Sapiens
  misc_feature (1)..(1): Xaa can be any naturally occurring amino acid
XCSCHPQYKMHTDGRSCLEREDTVLEVTESNTTSVVDGDKRVKRRLLMETCAVNNGGCDRTCKDTSTGVHCSCPVGFTLQLDGKTCKDIDECQTRNGGCDHFCKNIVGSFDCGCKKGFKLLTDEKSCQDVDECSLDRTCDHSCINHPGTFACACNRGYTLYGFTHCGEVKGL

SEQ ID NO: 11730 - protein, 112 aa, Homo Sapiens
  misc_feature (1)..(1): Xaa can be any naturally occurring amino acid
XGDFTGYIESPNYPGNYPANTECTWTINPPPKRRILIVVPEIFLPIEDDCGDYLVMRKTSSSNSVTTYETCQTYERPIAFTSRSKKLWIQFKSNEGNSARGFQVPYVTYDDA

SEQ ID NO: 11731 - protein, 192 aa, Homo Sapiens
  misc_feature (1)..(1): Xaa can be any naturally occurring amino acid
XKRRLLMETCAVNNGGCDRTCKDTSTGVHCSCPVGFTLQLDGKTCKDIDECQTRNGGCDHFCKNIVGSFDCGCKKGFKLLTDEKSCQDVDECSLDRTCDHSCINHPGTFACACNRGYTLYGFTHCGDTNECSINNGGCQQVCVNTVGSYECQCHPGYKLHWNKKDCVVKGLLPTSVSPRVSLHCGKSGGGDG

SEQ ID NO: 11732 - protein, 119 aa, Homo Sapiens
  misc_feature (1)..(1): Xaa can be any naturally occurring amino acid
XYIESPNYPGNYPANTECTWTINPPPKRRILIVVPEIFLPIEDDCGDYLVMRKTSSSNSVTTYETCQTYERPIAFTSRSKKLWIQFKSNEGNSARGFQVPYVTYDGKHSLQHMERASLL

SEQ ID NO: 11733 - protein, 993 aa, Homo Sapiens
MGSGRVPGLCLLVLLVHARAAQYSKAAQDVDECVEGTDNCHIDAICQNTPRSYKCICKSGYTGDGKHCKDVDECEREDNAGCVHDCVNIPGNYRCTCYDGFHLAHDGHNCLDVDECAEGNGGCQQSCVNMMGSYECHCREGFFLSDNQHTCIQRPEEGMNCMNKNHGCAHICRETPKGGIACECRPGFELTKNQRDCKLTCNYGNGGCQHTCDDTEQGPRCGCHIKFVLHTDGKTCIETCAVNNGGCDSKCHDAATGVHCTCPVGFMLQPDRKTCKDIDECRLNNGGCDHICRNTVGSFECSCKKGYKLLINERNCQDIDECSFDRTCDHICVNTPGSFQCLCHRGYLLYGITHCGDVDECSINRGGCRFGCINTPGSYQCTCPAGQGRLHWNGKDCTEPLKCQGSPGASKAMLSCNRSGKKDTCALTCPSRARFLPESENGFTVSCGTPSPRAAPARAGHNGNSTNSNHCHEAAVLSIKQRASFKIKDAKCRLHLRNKGKTEEAGRITGPGGAPCSECQVTFIHLKCDSSRKGKGRRARTPPGKEVTRLTLELEAEVRAEETTASCGLPCLRQRMERRLKGSLKMLRKSINQDRFLLRLAGLDYELAHKPGLVAGERAEPMESCRPGQHRAGTKCVSCPQGTYYHGQTEQCVPCPAGTFQEREGQLSCDLCPGSDAHGPLGATNVTTCAGQCPPGQHSVDGFKPCQPCPRGTYQPEAGRTLCFPCGGGLTTKHEGAISFQDCDTKVQCSPGHYYNTSIHRCIRCAMGSYQPDFRQNFCSRCPGNTSTDFDGSTSVAQCKNRQCGGELGEFTGYIESPNYPGNYPAGVECIWNINPPPKRKILIVVPEIFLPSEDECGDVLVMRKNSSPSSITTYETCQTYERPIAFTARSRKLWINFKTSEANSARGFQIPYVTYDEDYEQLVEDIVRDGRLYASENHQEILKDKKLIKAFFEVLAHPQNYFKYTEKHKEMLPKSFIKLLRSKVSSFLRPYK

SEQ ID NO: 11734 - protein, 310 aa, Homo Sapiens
MRRAALWLWLCALALSLQPALPQIVATNLPPEDQDGSGDDSDNFSGSGAGALQDITLSQQTPSTWKDTQLLTAIPTSPEPTGLEATAASTSTLPAGEGPKEGEAVVLPEVEPGLTAREQEATPRPRETTQLPTTHLASTTTATTAQEPATSHPHRDMQPGHHETSTPAGPSQADLHTPHTEDGGPSATERAAEDGASSQLPAAEGSGEQDFTFETSGENTAVVAVEPDRRNQSPVDQGATGASQGLLDRKEVLGGVIAGGLVGLIFAVCLVGFMLYRMKKKDEGSYSLEEPKQANGGAYQKPTKQEEFYA

SEQ ID NO: 11735 - protein, 310 aa, Homo Sapiens; identical to SEQ ID NO: 11734

SEQ ID NO: 11736 - protein, 169 aa, Homo Sapiens
MRRAALWLWLCALALSLQPALPQIVATNLPPEDQDGSGDDSDNFSGSGAGALQDITLSQQTPSTWKDTQLLTAIPTSPEPTGLEATAASTSTLPAGEGPKEGEAVVLPEVEPGLTAREQEATPRPRETTQLPTTHLASTTTATTAQEPATSHPHRDMQPVHFVSWGGLI

SEQ ID NO: 11737 - protein, 28 aa, Homo Sapiens
MRRAALWLWLCALALSLQPALPSLSHGR

SEQ ID NO: 11738 - protein, 215 aa, Homo Sapiens
PRWPGEPGQGCVGGAGERLQGPRACRGRLEQIVATNLPPEDQDGSGDDSDNFSGSGAGALQDITLSQQTPSTWKDTQLLTAIPTSPEPTGLEATAASTSTLPAGEGPKEGEAVVLPEVEPGLTAREQEATPRPRETTQLPTTHLASTTTATTAQEPATSHPHRDMQPGHHETSTPAGPSQADLHTPHTEDGGPSATERAAEDGASSQLPAAEGSG

SEQ ID NO: 11739 - protein, 211 aa, Homo Sapiens
MAVVPLLLLGGLWSAVGASSLGVVTCGSVVKLLNTRHNVRLHSHDVRYGSGSGQQSVTGVTSVDDSNSYWRIRGKSATVCERGTPIKCGQPIRLTHVNTGRNLHSHHFTSPLSGNQEVSAFGEEGEGDYLDDWTVLCNGPYWVRDGEVRFKHSSTEVLLSVTGEQYGRPISGQKEVHGMAQPSQNNYWKAMEGIFMKPSELLKAEAHHAEL

SEQ ID NO: 11740 - protein, 104 aa, Homo Sapiens
SLGVVTCGSVVKLLNTRHNVRLHSHDVRYGSGSGQQSVTGVTSVDDSNSYWRIRGKSATVCERGTPIKCGQPIRLTHVNTGRNLHSHHFTSPLSGNQLLCKVIL

SEQ ID NO: 11741 - protein, 50 aa, Homo Sapiens
  misc_feature (1)..(1): Xaa can be any naturally occurring amino acid
XRNLHSHHFTSPLSGNQENNMVDLSVGKKRCMAWPSQVRTTTGKPWKASS

SEQ ID NO: 11742 - protein, 221 aa, Homo Sapiens
MWSAGRGGAAWPVLLGLLLALLVPGGGAAKTGAELVTCGSVLKLLNTHHRVRLHSHDIKYGSGSGQQSVTGVEASDDANSYWRIRGGSEGGCPRGSPVRCGQAVRLTHVLTGKNLHTHHFPSPLSNNQEVSAFGEDGEGDDLDLWTVRCSGQHWEREAAVRFQHVGTSVFLSVTGEQYGSPIRGQHEVHGMPSANTHNTWKAMEGIFIKPSVEPSAGHDEL

SEQ ID NO: 11743 - protein, 254 aa, Homo Sapiens
MVWPWVAMASRWGPLIGLAPCCLWLLGAVLLMDASARPANHSSTRERVANREENEILPPDHLNGVKLEMDGHLNRGFHQEVFLGKDLGGFDEDAEPRRSRRKLMVIFSKVDVNTDRKISAKEMQRWIMEKTAEHFQEAMEESKTHFRAVDPDGDGHVSWDEYKVKFLASKGHSEKEVADAIRLNEELKVDEESCAPLSTGSPGEPEGPLVPGGQPPCRPAADGGGVPVVPPPRAQPGNAQVHGEGDRPGPGPGR

SEQ ID NO: 11744 - protein, 348 aa, Homo Sapiens
MVWPWVAMASRWGPLIGLAPCCLWLLGAVLLMDASARPANHSSTRERVANREENEILPPDHLNGVKLEMDGHLNRGFHQEVFLGKDLGGFDEDAEPRRSRRKLMVIFSKVDVNTDRKISAKEMQRWIMEKTAEHFQEAMEESKTHFRAVDPDGDGHVSWDEYKVKFLASKGHSEKEVADAIRLNEELKVDEETQEVLENLKDRWYQADSPPADLLLTEEEFLSFLHPEHSRGMLRFMVKEIVRDLDQDGDKQLSVPEFISLPVGTVENQQGQDIDDNWVKDRKKEFEELIDSNHDGIVTAEELENVPTLPLQPIGTLNSHFVRLAAELGGGKATLTCAPLARRATWTP

SEQ ID NO: 11745 - protein, 362 aa, Homo Sapiens
MVWPWVAMASRWGPLIGLAPCCLWLLGAVLLMDASARPANHSSTRERVANREENEILPPDHLNGVKLEMDGHLNRGFHQEVFLGKDLGGFDEDAEPRRSRRKLMVIFSKVDVNTDRKISAKEMQRWIMEKTAEHFQEAMEESKTHFRAVDPDGDGHVSWDEYKVKFLASKGHSEKEVADAIRLNEELKVDEETQEVLENLKDRWYQADSPPADLLLTEEEFLSFLHPEHSRGMLRFMVKEIVRDLDQDGDKQLSVPEFISLPVGTVENQQGQDIDDNWVKDRKKEFEELIDSNHDGIVTAEELESYMDPMNEYNALNEAKQMIAVADENQNHHLEPEEVLKYSEFFTGSKLVDYARSVHEEF

SEQ ID NO: 11746 - protein, 243 aa, Homo Sapiens
  misc_feature (1)..(1): Xaa can be any naturally occurring amino acid
XLEMDGHLNRGFHQEVFLGKDLGGFDEDAEPRRSRRKLMVIFSKVDVNTDRKISAKEMQRWIMEKTAEHFQEAMEESKTHFRAVDPDGDGHVSWDEYKVKFLASKGHSEKEVADAIRLNEELKVDEESSTSRNFLDLRAGVCRPRYPQAAPLSAQEVLENLKDRWYQADSPPADLLLTEEEFLSFLHPEHSRGMLRFMVKEIVRDLDQDGDKQLSVPEFISLPVGTVENQQGQDIDDNWVKDR

SEQ ID NO: 11747 - protein, 65 aa, Homo Sapiens
MAVSTVFSTSSLGIGLFVAVGSVSPSGKEDLGFPTPPSSPLAEVTTLTSYLDKLSTSLDWEPLGD

SEQ ID NO: 11748 - protein, 65 aa, Homo Sapiens; identical to SEQ ID NO: 11747

SEQ ID NO: 11749 - protein, 28 aa, Homo Sapiens
MAVSTVFSTSSLKLNQPQKYLKMKSWPC

SEQ ID NO: 11750 - protein, 88 aa, Homo Sapiens
MAVSTVFSTSSLMLALSRHSLLSPLLSVTSFRRFYRGDSPTDSQKDMIEIPLPPWQERTDESIETKRARLLYESRKRGMLENCILLRS

SEQ ID NO: 11751 - protein, 166 aa, Homo Sapiens
MAVSTVFSTSSLMLALSRHSLLSPLLSVTSFRRFYRGDSPTDSQKDMIEIPLPPWQERTDESIETKRARLLYESRKRGMLENCILLSLFAKEHLQHMTEKQLNLYDRLINEPSNDWDIYYWATEAKPAPEIFENEVMALLRDFAKNKNKEQRLRAPDLEYLFEKPR

SEQ ID NO: 11752 - protein, 133 aa, Homo Sapiens
MAVSTVFSTSSLMLALSRHSLLSPLLSVTSFRRFYRGDSPTDSQKDMIEIPLPPWQERTDESIETKRARLLYESRKRGMLENCILLSLFAKEHLQHMTEKQLNLYDRLINEPSNDWDIYYWATGSSDSPASAS

SEQ ID NO: 11753 - protein, 141 aa, Homo Sapiens
MAVSTVFSTSSLMLALSRHSLLSPLLSVTSFRRFYRGDSPTDSQKDMIEIPLPPWQERTDESIETKRARLLYESRKRGMLENCILLSLFAKEHLQHMTEKQLNLYDRLINEPSNDWDIYYWATGTGYDKQHNVKIGQFRLI

SEQ ID NO: 11754 - protein, 129 aa, Homo Sapiens
MAVSTVFSTSSLMLALSRHSLLSPLLSVTSFRRFYRGDSPTDSQKDMIEIPLPPWQERTDESIETKRARLLYESRKRGMLENCILLSLFAKEHLQHMTEKQLNLYDRLINEPSNDWDIYYWATGWSAMA

SEQ ID NO: 11755 - protein, 108 aa, Homo Sapiens
MTPSRLPWLLSWVSATAWRAARSPLLCHSLRKTSSSQGGKSELVKQSLKKPKLPEGRFDAPEDSHLEKEPLEKFPDDVNPVTKEKGGPRGPEPTRYGDWERKGRCIDF

SEQ ID NO: 11756 - protein, 280 aa, Homo Sapiens
MAAVVALSLRRRLPATTLGGACLQASRGAQTAAATAPRIKKFAIYRWDPDKAGDKPHMQTYEVDLNKCGPMVLDALIKIKNEVDSTLTFRRSCREGICGSCAMNINGGNTLACTRRIDTNLNKVSKIYPLPHMYVIKDLVPDLSNFYAQYKSIEPYLKKKDESQEGKQQYLQSIEEREKLDGLYECILCACCSTSCPSYWWNGDKYLGPAVLMQAYRWMIDSRDDFTEERLAKLQDPFSLYRCHTIMNCTRTCPKGLNPGKAIAEIKKMMATYKEKKASV

SEQ ID NO: 11757 - protein, 200 aa, Homo Sapiens
MFNLTLVHYKASRGAQTAAATAPRIKKFAIYRWDPDKAGDKPHMQTYEVDLNKCGPMVLDALIKIKNEVDSTLTFRRSCREGICGSCAMNINGGNTLACTRRIDTNLNKVSKIYPLPHMYVIKDLVPDLSNFYAQYKSIEPYLKKKDESQEGKQQYLQSIEEREKLDGLYECILCACCSTSCPSYWWNGDKYLGPAVLMQ

SEQ ID NO: 11758 - protein, 123 aa, Homo Sapiens
MQTYEVDLNKCGPMVLDALIKIKNEVDSTLTFRRSCREGICGSCAMNINGGNTLACTRRIDTNLNKVSKIYPLPHMYVIKDLVPDLSNFYAQYKSIEPYLKKKDESQEGKQQYLQSIEEREKL

SEQ ID NO: 11759 - protein, 120 aa, Homo Sapiens
MAVLWRLSAVCGALGGRAGSKAASLHWTSERVVSVLLLGLLPAAYLNPCSAMDYSLAAALTLHGHWGLGQVVTDYVHGDALQKAAKAGLLALSALTFAGLCYFNYHDVGICKAVAMLWKL

SEQ ID NO: 11760 - protein, 72 aa, Homo Sapiens
MAVLWRLSAVCGALGGRALLLRTPVVRPAHISAFLQDRPIPEWCGVQHIHLSPSHHCWSAVVRSRLTATSTF

SEQ ID NO: 11761 - protein, 131 aa, Homo Sapiens
MAVLWRLSAVCGALGGRALLLRTPVVRPAHISAFLQDRPIPEWCGVQHIHLSPSHHSGSKAASLHWTSERVVSVLLLGLLPAAYLNPCSAMDYSLAAALTLHGALDKLLLTMFMGMPCRKLPRQGFWHFQL

SEQ ID NO: 11762 - protein, 104 aa, Homo Sapiens
MAVLWRLSAVCGALGGRALLLRTPVVRPAHISAFLQDRPIPEWCGVQHIHLSPSHHSGSKAASLHWTSERVVSVLLLGLLPAAYLNPCSAMDYSLAAALTLHGH

SEQ ID NO: 11763 - protein, 159 aa, Homo Sapiens
MAVLWRLSAVCGALGGRALLLRTPVVRPAHISAFLQDRPIPEWCGVQHIHLSPSHHSGSKAASLHWTSERVVSVLLLGLLPAAYLNPCSAMDYSLAAALTLHGHWGLGQVVTDYVHGDALQKAAKAGLLALSALTFAGLCYFNYHDVGICKAVAMLWKL

SEQ ID NO: 11764 - protein, 143 aa, Homo Sapiens
MAVLWRLSAVCGALGGRALLLRTPVVRPAHISAFLQDRPIPEWCGVQHIHLSPSHHSGSKAASLHWTSERVVSVLLLGLLPAAYLNPCSAMDYSLAAALTLHGHWLECNGAILARHDLGSARSQLTATSAFRVQAILLPQPPK

SEQ ID NO: 11765 - protein, 143 aa, Homo Sapiens; identical to SEQ ID NO: 11764

SEQ ID NO: 11766 - protein, 85 aa, Homo Sapiens
MAVLWRLSAVCGALGGRALLLRTPVVRPAHISAFLQDRPIPEWCGVQHIHLSPSHHWALDKLLLTMFMGMPCRKLPRQGFWHFQL

SEQ ID NO: 11767 - protein, 55 aa, Homo Sapiens
  misc_feature (1)..(1): Xaa can be any naturally occurring amino acid
XGSKAASLHWTSERVVSVLLLGLLPAAYLNPCSAMDYSLAAALTLHGHWKIKNNE

SEQ ID NO: 11768 - protein, 101 aa, Homo Sapiens
  misc_feature (1)..(1): Xaa can be any naturally occurring amino acid
XWRLSAVCGALGGRALLLRTPVVRPAHISAFLQDRPIPEWCGVQHIHLSPSHHSGSKAASLHWTSERVVSVLLLGLLPAAYLNPCSAMDYSLAAALTLHGH

SEQ ID NO: 11769 - protein, 353 aa, Homo Sapiens
MEFRKTMDIDHILDWQPPEVIQKYMPGGLCGYDRDGCPVWYDIIGPLDPKGLLFSVTKQDLLKTKMRDCERILHECDLQTERLGKKIETIVMIFDCEGLGLKHFWKPLVEVYQEFFGLLEENYPETLKFMLIVKATKLFPVGYNLMKPFLSEDTRRKIIVLGNNWKEGLLKLISPEELPAQFGGTLTDPDGNPKCLTKINYGGEIPKSMYVRDQVKTQYEHSVQINRGSSHQVEYEILFPGCVLRWQFSSDGADIGFGVFLKTKMGERQRAGEMTDVLPSQRYNAHMVPEDGNLTCSEAGVYVESESGKSCCHLPVIICSHELQNSHSNSQVMAYQMVRKCKLSRPLPLPASN

SEQ ID NO: 11770 - protein, 341 aa, Homo Sapiens
MEFRKTMDIDHILDWQPPEVIQKYMPGGLCGYDRDGCPVWYDIIGPLDPKGLLFSVTKQDLLKTKMRDCERILHECDLQTERLGKKIETIVMIFDCEGLGLKHFWKPLVEVYQEFFGLLEENYPETLKFMLIVKATKLFPVGYNLMKPFLSEDTRRKIIVLGNNWKEGLLKLISPEELPAQFGGTLTDPDGNPKCLTKINYGGEIPKSMYVRDQVKTQYEHSVQINRGSSHQVEYEILFPGCVLRWQFSSDGADIGFGVFLKTKMGERQRAGEMTDVLPSQRYNAHMVPEDGNLTCSEAGVYVLRFDNTYSFVHAKKVSFTVEVLLPDEGMQKYDKELTPV

SEQ ID NO: 11771 - protein, 400 aa, Homo Sapiens
MSGRVGDLSPKQAETLAKFRENVQDVLPALPNPDDYFLLRWLRARNFDLQKSEALLRKYMEFRKTMDIDHILDWQPPEVIQKYMPGGLCGYDRDGCPVWYDIIGPLDPKGLLFSVTKQDLLKTKMRDCERILHECDLQTERLGKKIETIVMIFDCEGLGLKHFWKPLVEVYQEFFGLLEENYPETLKFMLIVKATKLFPVGYNLMKPFLSEDTRRKIIVLGNNWKEGLLKLISPEELPAQFGGTLTDPDGNPKCLTKINYGGEIPKSMYVRDQVKTQYEHSVQINRGSSHQVEYEILFPGCVLRWQFSSDGADIGFGVFLKTKMGERQRAGEMTDVLPSQRYNAHMVPEDGNLTCSEAGVYVLRFDNTYSFVHAKKVSFTVEVLLPDEGMQKYDKELTPV

SEQ ID NO: 11772 - protein, 51 aa, Homo Sapiens
MSGRVGDLSPKQAETLAKMESLSSRLECCGAISAHCSLCLPGSSNSPASAS

SEQ ID NO: 11773 - protein, 323 aa, Homo Sapiens
MVIQKYMPGGLCGYDRDGCPVWYDIIGPLDPKGLLFSVTKQDLLKTKMRDCERILHECDLQTERLGKKIETIVMIFDCEGLGLKHFWKPLVEVYQEFFGLLEENYPETLKFMLIVKATKLFPVGYNLMKPFLSEDTRRKIIVLGNNWKEGLLKLISPEELPAQFGGTLTDPDGNPKCLTKINYGGEIPKSMYVRDQVKTQYEHSVQINRGSSHQVEYEILFPGCVLRWQFSSDGADIGFGVFLKTKMGERQRAGEMTDVLPSQRYNAHMVPEDGNLTCSEAGVYVLRFDNTYSFVHAKKVSFTVEVLLPDEGMQKYDKELTPV

SEQ ID NO: 11774 - protein, 323 aa, Homo Sapiens; identical to SEQ ID NO: 11773

SEQ ID NO: 11775 - protein, 231 aa, Homo Sapiens
  misc_feature (1)..(1): Xaa can be any naturally occurring amino acid
XKTSRMCFLPCPTLMIISFYAGSEYMEFRKTMDIDHILDWQPPEVIQKYMPGGLCGYDRDGCPVWYDIIGPLDPKGLLFSVTKQDLLKTKMRDCERILHECDLQTERLGKKIETIVMIFDCEGLGLKHFWKPLVEVYQEFFGLLEENYPETLKFMLIVKATKLFPVGYNLMKPFLSEDTRRKIIVLGNNWKEGLLKLISPEELPAQFGGTLTDPDGNPKCLTKINYGGEIP

SEQ ID NO: 11776 - protein, 1059 aa, Homo Sapiens
ARVRDPRTYDRRYWCDAEYDAYRREHSAFGDRPEKRDNNWRYDPRFTGSFDDDPDPHRDPYGEEVDRRSVHSEHSARSLHSAHSLASRRSSLSSHSHQSQIYRSHNVAAGSYEAPLPPGSFHGDFAYGTYRSNFSSGPGFPEYGYPADTVWPAMEQVSSRPTSPEKFSVPHVCARFGPGGQLIKVIPNLPSEGQPALVEVHSMEALLQHTSEQEEMRAFPGPLAKDDTHKVDVINFAQNKAMKCLQNENLIDKESASLLWNFIVLLCRQNGTVVGTDIAELLLRDHRTVWLPGKSPNEANLIDFTNEAVEQVEEEESGEAQLSFLTGGPAAAASSLERETERFRELLLYGRKKDALESAMKNGLWGHALLLASKMDSRTHARVMTRFANSLPINDPLQTVYQLMSGRMPAASTCCGDEKWGDWRPHLAMVLSNLNNNMDVESRTMATMGDTLASRGLLDAAHFCYLMAQAGFGVYTKKTTKLVLIGSNHSLPFLKFATNEAIQRTEAYEYAQSLGAETCPLPSFQVFKFIYSCRLAEMGLATQAFHYCEAIAKSILTQPHLYSPVLISQLVQMASQLRLFDPQLKEKPEEESLAAPTWLVHLQQVERQIKEGAGVWHQDGALPQQCPGTPSSEMEQLDRPGLSQPGALGIANPLLAVPAPSPEHSSPSVRLLPSAPQTLPDGPLASPARVPMFPVPLPPGPLEPGPGCVTPGPALGFLEPSGPGLPPGVPPLQERRHLLQEARSPDPGIVPQEAPVGNSLSELSEENFDGKFANLTPSRTVPDSEAPPGWDRADSGPTQPPLSLSPAPETKRPGQAAKKETKEPKKGESWFFRWLPGKKKTEAYLPDDKNKSIVWDEKKNQWVNLNEPEEEKKAPPPPPTSMPKTVQAAPPALPGPPGAPVNMYSRRAAGTRARYVDVLNPSGTQRSEPALAPADFVAPLAPLPIPSNLFVPTPDAEEPQLPDGTGREGPAAARGLANPEPAPEPKVLSSAASLPGSELPSSRPEGSQGGEAPGDLPAAGGPPSGAMPFYNPAQLAQACATSGSSRLGRIGQRKHLVLN

SEQ ID NO: 11777 - protein, 385 aa, Homo Sapiens
MDLLPTSILLASLWICSHLHPPGVSVDLPPTSILLVSLWICSHLHPPGVSVDRPPPPSSWCLCGSPPTSILLVSLWICSPPPSSWCLCGSAPTSILLVSLWIWRLWGLTEGESWFFRWLPGKKKTEAYLPDDKNKSIVWDEKKNQWVNLNEPEEEKKAPPPPPTSMPKTVQAAPPALPGPPGAPVNMYSRRAAGTRARYVDVLNPSGTQRSEPALAPADFVAPLAPLPIPSNLFVPTPVSSVRPQGRSGRNDGLLALSSPDAEEPQLPDGTGREGPAAARGLANPEPAPEPKVLSSAASLPGSELPSSRPEGSQGGELSRCSSMSSLSREVSQHFNQAPGDLPAAGGPPSGAMPFYNPAQLAQACATSGSSRLGRIGQRKHLVLN

SEQ ID NO: 11778 - protein, 2134 aa, Homo Sapiens
MPGLDRPLSRQNPHDGVVTPAASPSLPQPGLQMPGQWGPVQGGPQPSGQHRSPCPEGPVPSGVPCATSVPHFPTPSILHQGPGHEQHSPLVAPPAALPSDGRDEVSHLQSGSHLANNSDPESTFRQNPRIVNHWASPELRQNPGVKNEHRPASALVNPLARGDSPENRTHHPLGAGAGSGCAPLEADSGASGALAMFFQGGETENEENLSSEKAGLSGQADFDDFCSSPGLGRPPAPTHVGAGSLCQALLPGPSNEAAGDVWGDTASTGVPDASGSQYENVENLEFVQNQEVLPSEPLNLDPSSPSDQFRYGPLPGPAVPRHGAVCHTGAPDATLHTVHPDSVSSSYSSRSHGRLSGSARPQELVGTFIQQEVGKPEDEASGSFFKQIDSSPVGGETDETTVSQNYRGSVSQPSTPSPPKPTGIFQTSANSSFEPVKSHLVGVKPFEADRANVVGEVRETCVRQKQCRPAAALPDASPGNLEQPPDNMETLCAPQVCPLPLNSTTEAVHMLPHAGAPPLDTVYPAPEKRPSARTQGPVKCESPATTLWAQSELPDFGGNVLLAPAAPALYVCAKPQPPVVQPPEEAMSGQQSRNPSSAAPVQSRGGIGASENLENPPKMGEEEALQSQASSGYASLLSSPPTESLQNPPVLIAQPDHSYNLAQPINFSVSLSNSHEKNQSWREALVGDRPAVSSWALGGDSGENTSLSGIPTSSVLSLSLPSSVAQSNFPQGSGASEMVSNQPANLLVQPPSQPVPENLVPESQKDRKAGSALPGFANSPAGSTSVVLVPPAHGTLVPDGNKANHSSHQEDTYGALDFTLSRTLENPVNVYNPSHSDSLASQQSVASHPRQSGPGAPNLDRFYQQVTKDAQGQPGLERAQQELVPPQQQASPPQLPKAMFSELSNPESLPAQGQAQNSAQSPASLVLVDAGQQLPPRPPQSSSVSLVSSGSGQAAVPSEQPWPQPVPALAPGPPPQDLAAYYYYRPLYDAYQPQYSLPYPPEPGAASLYYQDVYSLYEPRYRPYDGAASAYAQNYRYPEPERPSSRASHSSERPPPRQGYPEGYYSSKSGWSSQSDYYASYYSSQYDYGDPGHWDRYHYSARVRDPRTYDRRYWCDAEYDAYRREHSAFGDRPEKRDNNWRYDPRFTGSFDDDPDPHRDPYGEEVDRRSVHSEHSARSLHSAHSLASRRSSLSSHSHQSQIYRSHNVAAGSYEAPLPPGSFHGDFAYGTYRSNFSSGPGFPEYGYPADTVWPAMEQVSSRPTSPEKFSVPHVCARFGPGGQLIKVIPNLPSEGQPALVEVHSMEALLQHTSEQEEMRAFPGPLAKDDTHKVDVINFAQNKAMKCLQNENLIDKESASLLWNFIVLLCRQNGTVVGTDIAELLLRDHRTVWLPGKSPNEANLIDFTNEAVEQVEEEESGEAQLSFLTGGPAAAASSLERETERFRELLLYGRKKDALESAMKNGLWGHALLLASKMDSRTHARVMTRFANSLPINDPLQTVYQLMSGRMPAASTCCGDEKWGDWRPHLAMVLSNLNNNMDVESRTMATMGDTLASRGLLDAAHFCYLMAQAGFGVYTKKTTKLVLIGSNHSLPFLKFATNEAIQRTEAYEYAQSLGAETCPLPSFQVFKFIYSCRLAEMGLATQAFHYCEAIAKSILTQPHLYSPVLISQLVQMASQLRLFDPQLKEKPEEESLAAPTWLVHLQQVERQIKEGAGVWHQDGALPQQCPGTPSSEMEQLDRPGLSQPGALGIANPLLAVPAPSPEHSSPSVRLLPSAPQTLPDGPLASPARVPMFPVPLPPGPLEPGPGCVTPGPALGFLEPSGPGLPPGVPPLQERRHLLQEARSPDPGIVPQEAPVGNSLSELSEENFDGKFANLTPSRTVPDSEAPPGWDRADSGPTQPPLSLSPAPETKRPGQAAKKETKEPKKGESWFFRWLPGKKKTEAYLPDDKNKSIVWDEKKNQWVNLNEPEEEKKAPPPPPTSMPKTVQAAPPALPGPPGAPVNMYSRRAAGTRARYVDVLNPSGTQRSEPALAPADFVAPLAPLPIPSNLFVPTPDAEEPQLPDGTGREGPAAARGLANPEPAPEPKAPGDLPAAGGPPSGAMPFYNPAQLAQACATSGSSRLGRIGQRKHLVLN

SEQ ID NO: 11779 - protein, 2154 aa, Homo Sapiens
MPGLDRPLSRQNPHDGVVTPAASPSLPQPGLQMPGQWGPVQGGPQPSGQHRSPCPEGPVPSGVPCATSVPHFPTPSILHQGPGHEQHSPLVAPPAALPSDGRDEVSHLQSGSHLANNSDPESTFRQNPRIVNHWASPELRQNPGVKNEHRPASALVNPLARGDSPENRTHHPLGAGAGSGCAPLEADSGASGALAMFFQGGETENEENLSSEKAGLSGQADFDDFCSSPGLGRPPAPTHVGAGSLCQALLPGPSNEAAGDVWGDTASTGVPDASGSQYENVENLEFVQNQEVLPSEPLNLDPSSPSDQFRYGPLPGPAVPRHGAVCHTGAPDATLHTVHPDSVSSSYSSRSHGRLSGSARPQELVGTFIQQEVGKPEDEASGSFFKQIDSSPVGGETDETTVSQNYRGSVSQPSTPSPPKPTGIFQTSANSSFEPVKSHLVGVKPFEADRANVVGEVRETCVRQKQCRPAAALPDASPGNLEQPPDNMETLCAPQVCPLPLNSTTEAVHMLPHAGAPPLDTVYPAPEKRPSARTQGPVKCESPATTLWAQSELPDFGGNVLLAPAAPALYVCAKPQPPVVQPPEEAMSGQQSRNPSSAAPVQSRGGIGASENLENPPKMGEEEALQSQASSGYASLLSSPPTESLQNPPVLIAQPDHSYNLAQPINFSVSLSNSHEKNQSWREALVGDRPAVSSWALGGDSGENTSLSGIPTSSVLSLSLPSSVAQSNFPQGSGASEMVSNQPANLLVQPPSQPVPENLVPESQKDRKAGSALPGFANSPAGSTSVVLVPPAHGTLVPDGNKANHSSHQEDTYGALDFTLSRTLENPVNVYNPSHSDSLASQQSVASHPRQSGPGAPNLDRFYQQVTKDAQGQPGLERAQQELVPPQQQASPPQLPKAMFSELSNPESLPAQGQAQNSAQSPASLVLVDAGQQLPPRPPQSSSVSLVSSGSGQAAVPSEQPWPQPVPALAPGPPPQDLAAYYYYRPLYDAYQPQYSLPYPPEPGAASLYYQDVYSLYEPRYRPYDGAASAYAQNYRYPEPERPSSRASHSSERPPPRQGYPEGYYSSKSGWSSQSDYYASYYSSQYDYGDPGHWDRYHYSARVRDPRTYDRRYWCDAEYDAYRREHSAFGDRPEKRDNNWRYDPRFTGSFDDDPDPHRDPYGEEVDRRSVHSEHSARSLHSAHSLASRRSSLSSHSHQSQIYRSHNVAAGSYEAPLPPGSFHGDFAYGTYRSNFSSGPGFPEYGYPADTVWPAMEQVSSRPTSPEKFSVPHVCARFGPGGQLIKVIPNLPSEGQPALVEVHSMEALLQHTSEQEEMRAFPGPLAKDDTHKVDVINFAQNKAMKCLQNENLIDKESASLLWNFIVLLCRQNGTVVGTDIAELLLRDHRTVWLPGKSPNEANLIDFTNEAVEQVEEEESGEAQLSFLTGGPAAAASSLERETERFRELLLYGRKKDALESAMKNGLWGHALLLASKMDSRTHARVMTRFANSLPINDPLQTVYQLMSGRMPAASTCCGDEKWGDWRPHLAMVLSNLNNNMDVESRTMATMGDTLASRGLLDAAHFCYLMAQAGFGVYTKKTTKLVLIGSNHSLPFLKFATNEAIQRTEAYEYAQSLGAETCPLPSFQVFKFIYSCRLAEMGLATQAFHYCEAIAKSILTQPHLYSPVLISQLVQMASQLRLFDPQLKEKPEEESLAAPTWLVHLQQVERQIKEGAGVWHQDGALPQQCPGTPSSEMEQLDRPGLSQPGALGIANPLLAVPAPSPEHSSPSVRLLPSAPQTLPDGPLASPARVPMFPVPLPPGPLEPGPGCVTPGPALGFLEPSGPGLPPGVPPLQERRHLLQEARSPDPGIVPQEAPVGNSLSELSEENFDGKFANLTPSRTVPDSEAPPGWDRADSGPTQPPLSLSPAPETKRPGQAAKKETKEPKKGESWFFRWLPGKKKTEAYLPDDKNKSIVWDEKKNQWVNLNEPEEEKKAPPPPPTSMPKTVQAAPPALPGPPGAPVNMYSRRAAGTRARYVDVLNPSGTQRSEPALAPADFVAPLAPLPIPSNLFVPTPDAEEPQLPDGTGREGPAAARGLANPEPAPEPKLSRCSSMSSLSREVSQHFNQAPGDLPAAGGPPSGAMPFYNPAQLAQACATSGSSRLGRIGQRKHLVLN

SEQ ID NO: 11780 - protein, 2357 aa, Homo Sapiens
MQPPPQTVPSGMAGPPPAGNPRSVFWASSPYRRRANNNAAVAPTTCPLQPVTDPFAFSRQALQSTPLGSSSKSSPPVLQGPAPAGFSQHPGLLVPHTHARDSSQGPCEPLPGPLTQPRAHASPFSGALTPSAPPGPEMNRSAEVGPSSEPEVQTLPYLPHYIPGVDPETSHGGHPHGNMPGLDRPLSRQNPHDGVVTPAASPSLPQPGLQMPGQWGPVQGGPQPSGQHRSPCPEGPVPSGVPCATSVPHFPTPSILHQGPGHEQHSPLVAPPAALPSDGRDEVSHLQSGSHLANNSDPESTFRQNPRIVNHWASPELRQNPGVKNEHRPASALVNPLARGDSPENRTHHPLGAGAGSGCAPLEADSGASGALAMFFQGGETENEENLSSEKAGLSGQADFDDFCSSPGLGRPPAPTHVGAGSLCQALLPGPSNEAAGDVWGDTASTGVPDASGSQYENVENLEFVQNQEVLPSEPLNLDPSSPSDQFRYGPLPGPAVPRHGAVCHTGAPDATLHTVHPDSVSSSYSSRSHGRLSGSARPQELVGTFIQQEVGKPEDEASGSFFKQIDSSPVGGETDETTVSQNYRGSVSQPSTPSPPKPTGIFQTSANSSFEPVKSHLVGVKPFEADRANVVGEVRETCVRQKQCRPAAALPDASPGNLEQPPDNMETLCAPQVCPLPLNSTTEAVHMLPHAGAPPLDTVYPAPEKRPSARTQGPVKCESPATTLWAQSELPDFGGNVLLAPAAPALYVCAKPQPPVVQPPEEAMSGQQSRNPSSAAPVQSRGGIGASENLENPPKMGEEEALQSQASSGYASLLSSPPTESLQNPPVLIAQPDHSYNLAQPINFSVSLSNSHEKNQSWREALVGDRPAVSSWALGGDSGENTSLSGIPTSSVLSLSLPSSVAQSNFPQGSGASEMVSNQPANLLVQPPSQPVPENLVPESQKDRKAGSALPGFANSPAGSTSVVLVPPAHGTLVPDGNKANHSSHQEDTYGALDFTLSRTLENPVNVYNPSHSDSLASQQSVASHPRQSGPGAPNLDRFYQQVTKDAQGQPGLERAQQELVPPQQQASPPQLPKAMFSELSNPESLPAQGQAQNSAQSPASLVLVDAGQQLPPRPPQSSSVSLVSSGSGQAAVPSEQPWPQPVPALAPGPPPQDLAAYYYYRPLYDAYQPQYSLPYPPEPGAASLYYQDVYSLYEPRYRPYDGAASAYAQNYRYPEPERPSSRASHSSERPPPRQGYPEGYYSSKSGWSSQSDYYASYYSSQYDYGDPGHWDRYHYSARVRDPRTYDRRYWCDAEYDAYRREHSAFGDRPEKRDNNWRYDPRFTGSFDDDPDPHRDPYGEEVDRRSVHSEHSARSLHSAHSLASRRSSLSSHSHQSQIYRSHNVAAGSYEAPLPPGSFHGDFAYGTYRSNFSSGPGFPEYGYPADTVWPAMEQVSSRPTSPEKFSVPHVCARFGPGGQLIKVIPNLPSEGQPALVEVHSMEALLQHTSEQEEMRAFPGPLAKDDTHKVDVINFAQNKAMKCLQNENLIDKESASLLWNFIVLLCRQNGTVVGTDIAELLLRDHRTVWLPGKSPNEANLIDFTNEAVEQVEEEESGEAQLSFLTGGPAAAASSLERETERFRELLLYGRKKDALESAMKNGLWGHALLLASKMDSRTHARVMTRFANSLPINDPLQTVYQLMSGRMPAASTCCGDEKWGDWRPHLAMVLSNLNNNMDVESRTMATMGDTLASRGLLDAAHFCYLMAQAGFGVYTKKTTKLVLIGSNHSLPFLKFATNEAIQRTEAYEYAQSLGAETCPLPSFQVFKFIYSCRLAEMGLATQAFHYCEAIAKSILTQPHLYSPVLISQLVQMASQLRLFDPQLKEKPEEESLAAPTWLVHLQQVERQIKEGAGVWHQDGALPQQCPGTPSSEMEQLDRPGLSQPGALGIANPLLAVPAPSPEHSSPSVRLLPSAPQTLPDGPLASPARVPMFPVPLPPGPLEPGPGCVTPGPALGFLEPSGPGLPPGVPPLQERRHLLQEARSPDPGIVPQEAPVGNSLSELSEENFDGKFANLTPSRTVPDSEAPPGWDRADSGPTQPPLSLSPAPETKRPGQAAKKETKEPKKGESWFFRWLPGKKKTEAYLPDDKNKSIVWDEKKNQWVNLNEPEEEKKAPPPPPTSMPKTVQAAPPALPGPPGAPVNMYSRRAAGTRARYVDVLNPSGTQRSEPALAPADFVAPLAPLPIPSNLFVPTPDAEEPQLPDGTGREGPAAARGLANPEPAPEPKVLSSAASLPGSELPSSRPEGSQGGELSRCSSMSSLSREVSQHFNQAPGDLPAAGGPPSGAMPFYNPAQLAQACATSGSSRLGRIGQRKHLVLN

SEQ ID NO: 11781 - protein, 2334 aa, Homo Sapiens
MQPPPQTVPSGMAGPPPAGNPRSVFWASSPYRRRANNNAAVAPTTCPLQPVTDPFAFSRQALQSTPLGSSSKSSPPVLQGPAPAGFSQHPGLLVPHTHARDSSQGPCEPLPGPLTQPRAHASPFSGALTPSAPPGPEMNRSAEVGPSSEPEVQTLPYLPHYIPGVDPETSHGGHPHGNMPGLDRPLSRQNPHDGVVTPAASPSLPQPGLQMPGQWGPVQGGPQPSGQHRSPCPEGPVPSGVPCATSVPHFPTPSILHQGPGHEQHSPLVAPPAALPSDGRDEVSHLQSGSHLANNSDPESTFRQNPRIVNHWASPELRQNPGVKNEHRPASALVNPLARGDSPENRTHHPLGAGAGSGCAPLEADSGASGALAMFFQGGETENEENLSSEKAGLSGQADFDDFCSSPGLGRPPAPTHVGAGSLCQALLPGPSNEAAGDVWGDTASTGVPDASGSQYENVENLEFVQNQEVLPSEPLNLDPSSPSDQFRYGPLPGPAVPRHGAVCHTGAPDATLHTVHPDSVSSSYSSRSHGRLSGSARPQELVGTFIQQEVGKPEDEASGSFFKQIDSSPVGGETDETTVSQNYRGSVSQPSTPSPPKPTGIFQTSANSSFEPVKSHLVGVKPFEADRANVVGEVRETCVRQKQCRPAAALPDASPGNLEQPPDNMETLCAPQVCPLPLNSTTEAVHMLPHAGAPPLDTVYPAPEKRPSARTQGPVKCESPATTLWAQSELPDFGGNVLLAPAAPALYVCAKPQPPVVQPPEEAMSGQQSRNPSSAAPVQSRGGIGASENLENPPKMGEEEALQSQASSGYASLLSSPPTESLQNPPVLIAQPDHSYNLAQPINFSVSLSNSHEKNQSWREALVGDRPAVSSWALGGDSGENTSLSGIPTSSVLSLSLPSSVAQSNFPQGSGASEMVSNQPANLLVQPPSQPVPENLVPESQKDRKAGSALPGFANSPAGSTSVVLVPPAHGTLVPDGNKANHSSHQEDTYGALDFTLSRTLENPVNVYNPSHSDSLASQQSVASHPRQSGPGAPNLDRFYQQVTKDAQGQPGLERAQQELVPPQQQASPPQLPKAMFSELSNPESLPAQGQAQNSAQSPASLVLVDAGQQLPPRPPQSSSVSLVSSGSGQAAVPSEQPWPQPVPALAPGPPPQDLAAYYYYRPLYDAYQPQYSLPYPPEPGAASLYYQDVYSLYEPRYRPYDGAASAYAQNYRYPEPERPSSRASHSSERPPPRQGYPEGYYSSKSGWSSQSDYYASYYSSQYDYGDPGHWDRYHYSARVRDPRTYDRRYWCDAEYDAYRREHSAFGDRPEKRDNNWRYDPRFTGSFDDDPDPHRDPYGEEVDRRSVHSEHSARSLHSAHSLASRRSSLSSHSHQSQIYRSHNVAAGSYEAPLPPGSFHGDFAYGTYRSNFSSGPGFPEYGYPADTVWPAMEQVSSRPTSPEKFSVPHVCARFGPGGQLIKVIPNLPSEGQPALVEVHSMEALLQHTSEQEEMRAFPGPLAKDDTHKVDVINFAQNKAMKCLQNENLIDKESASLLWNFIVLLCRQNGTVVGTDIAELLLRDHRTVWLPGKSPNEANLIDFTNEAVEQVEEEESGEAQLSFLTGGPAAAASSLERETERFRELLLYGRKKDALESAMKNGLWGHALLLASKMDSRTHARVMTRFANSLPINDPLQTVYQLMSGRMPAASTCCGDEKWGDWRPHLAMVLSNLNNNMDVESRTMATMGDTLASRGLLDAAHFCYLMAQAGFGVYTKKTTKLVLIGSNHSLPFLKFATNEAIQRTEAYEYAQSLGAETCPLPSFQVFKFIYSCRLAEMGLATQAFHYCEAIAKSILTQPHLYSPVLISQLVQMASQLRLFDPQLKEKPEEESLAAPTWLVHLQQVERQIKEGAGVWHQDGALPQQCPGTPSSEMEQLDRPGLSQPGALGIANPLLAVPAPSPEHSSPSVRLLPSAPQTLPDGPLASPARVPMFPVPLPPGPLEPGPGCVTPGPALGFLEPSGPGLPPGVPPLQERRHLLQEARSPDPGIVPQEAPVGNSLSELSEENFDGKFANLTPSRTVPDSEAPPGWDRADSGPTQPPLSLSPAPETKRPGQAAKKETKEPKKGESWFFRWLPGKKKTEAYLPDDKNKSIVWDEKKNQWVNLNEPEEEKKAPPPPPTSMPKTVQAAPPALPGPPGAPVNMYSRRAAGTRARYVDVLNPSGTQRSEPALAPADFVAPLAPLPIPSNLFVPTPVSSVRPQGRSGRNDGLLALSSPDAEEPQLPDGTGREGPAAARGLANPEPAPEPKAPGDLPAAGGPPSGAMPFYNPAQLAQACATSGSSRLGRIGQRKHLVLN

SEQ ID NO: 11782 - protein, 751 aa, Homo Sapiens
PAAAASSLERETERFRELLLYGRKKDALESAMKNGLWGHALLLASKMDSRTHARVMTRFANSLPINDPLQTVYQLMSGRMPAASTCCGDEKWGDWRPHLAMVLSNLNNNMDVESRTMATMGDTLASRGLLDAAHFCYLMAQAGFGVYTKKTTKLVLIGSNHSLPFLKFATNEAIQRTEAYEYAQSLGAETCPLPSFQVFKFIYSCRLAEMGLATQAFHYCEAIAKSILTQPHLYSPVLISQLVQMASQLRLFDPQLKEKPEEESLAAPTWLVHLQQVERQIKEGAGVWHQDGALPQQCPGTPSSEMEQLDRPGLSQPGALGIANPLLAVPAPSPEHSSPSVRLLPSAPQTLPDGPLASPARVPMFPVPLPPGPLEPGPGCVTPGPALGFLEPSGPGLPPGVPPLQERRHLLQEARSPDPGIVPQEAPVGNSLSELSEENFDGKFANLTPSRTVPDSEAPPGWDRADSGPTQPPLSLSPAPETKRPGQAAKKETKEPKKGESWFFRWLPGKKKTEAYLPDDKNKSIVWDEKKNQWVNLNEPEEEKKAPPPPPTSMPKTVQAAPPALPGPPGAPVNMYSRRAAGTRARYVDVLNPSGTQRSEPALAPADFVAPLAPLPIPSNLFVPTPDAEEPQLPDGTGREGPAAARGLANPEPAPEPKVLSSAASLPGSELPSSRPEGSQGGELSRCSSMSSLSREVSQHFNQAPGDLPAAGGPPSGAMPFYNPAQLAQACATSGSSRLGRIGQRKHLVLN

SEQ ID NO: 11783 - protein, 1060 aa, Homo Sapiens
MELWAPQRLPQTRGKATAPSKDPDRGFRRDGHHRPVPHSWHNGERFHQWQDNRGSPQPQQEPRADHQQQPHYASRPGDWHQPVSGVDYYEGGYRNQLYSRPGYENSYQSYQSPTMREEYAYGSYYYHGHPQWLQEERVPRQRSPYIWHEDYREQKYLDEHHYENQHSPFGTNSETHFQSNSRNPCKDSPASNSGQEWPGELFPGSLLAEAQKNKPSLASESNLLQQRESGLSSSSYELSQYIRDAPERDDPPASAAWSPVQADVSSAGPKAPMKFYIPHVPVSFGPGGQLVHVGPSSPTDGQAALVELHSMEVILNDSEEQEEMRSFSGPLIREDVHKVDIMTFCQQKAAQSCKSETLGSRDSALLWQLLVLLCRQNGSMVGSDIAELLMQDCKKLEKYKRQPPVANLINLTDEDWPVLSSGTPNLLTGEIPPSVETPAQIVEKFTRLLYYGRKKEALEWAMKNHLWGHALFLSSKMDPQTYSWVMSGFTSTLALNDPLQTLFQLMSGRIPQAATCCGEKQWGDWRPHLAVILSNQAGDPELYQRAIVAIGDTLAGKGLVEAAHFCYLMAHVPFGHYTVKTDHLVLLGSSHSQEFLKFATTEAIQRTEIFEYCQMLGRPKSFIPSFQVYKLLYASRLADYGLVSQALHYCEAIGAAVLSQGESSHPVLLVELIKLAEKLKLSDPLVLERRSGDRDLEPDWLAQLRRQLEQKVAGDIGDPHPTRSDISGAGGTTTENTFYQDFSGCQGYSEAPGYRSALWLTPEQTCLLQPSPQQPFPLQPGSYPAGGGAGQTGTPRPFYSVPETHLPGTGSSVAVTEATGGTVWEEMLQTHLGPGENTVSQETSQPPDGQEVISKPQTPLAARPRSISESSASSAKEDEKESSDEADKNSPRNTAQRGKLGDGKEHTKSSGFGWFSWFRSKPTKNASPAGDEDSSDSPDSEETPRASSPHQAGLGLSLTPSPESPPLPDVSAFSRGRGGGEGRGSASSGGAAAGAGVGGLSGPESVSFELCSNPGVLLPPPALKGAVPLYNPSQVPQLPTATSLNRPNRLAQRRYPTQPC

SEQ ID NO: 11784 - protein, 625 aa, Homo Sapiens
MELWAPQRLPQTRGKATAPSKDPDRGFRRDGHHRPVPHSWHNGERFHQWQDNRGSPQPQQEPRADHQQQPHYASRPGDWHQPVSGVDYYEGGYRNQLYSRPGYENSYQSYQSPTMREEYAYGSYYYHGHPQWLQEERVPRQRSPYIWHEDYREQKYLDEHHYENQHSPFGTNSETHFQSNSRNPCKDSPASNSGQEWPGELFPGSLLAEAQKNKPSLASESNLLQQRESGLSSSSYELSQYIRDAPERDDPPASAAWSPVQAEDVSSAGPKAPMKFYIPHVPVSFGPGGQLVHVGPSSPTDGQAALVELHSMEVILNDSEEQEEMRSFSGPLIREDVHKVDIMTFCQQKAAQSCKSETLGSRDSALLWQLLVLLCRQNGSMVGSDIAELLMQDCKKLEKYKRQPPVANLINLTDEDWPVLSSGTPNLLTGEIPPSVETPAQIVEKFTRLLYYGRKKEALEWAMKNHLWGHALFLSSKMDPQTYSWVMSGFTSTLALNDPLQTLFQLMSGRIPQAATCCGEKQWGDWRPHLAVILSNQAGDPELYQRAIVAIGDTLAGKGLVEAAHFCYLMAHVPFGHYTVKTDHLVLLGSSHRYATWEKGNSKDIFQGTVLALVGFYGSIFHFLM

SEQ ID NO: 11785 - protein, 316 aa, Homo Sapiens
MELWAPQRLPQTRGKATAPSKDPDRGFRRDGHHRPVPHSWHNGERFHQWQDNRGSPQPQQEPRADHQQQPHYASRPGDWHQPVSGVDYYEGGYRNQLYSRPGYENSYQSYQSPTMREEYAYGSYYYHGHPQWLQEERVPRQRSPYIWHEDYREQKYLDEHHYENQHSPFGTNSETHFQSNSRNPCKDSPASNSGQEWPGELFPGSLLAEAQKNKPSLASESNLLQQRESGLSSSSYELSQYIRDAPERDDPPASAAWSPVQADVSSAGPKAPMKFYIPHVPVSFGPGGQLVHVGPSSPTDGQAALVELHSMEGRCT

SEQ ID NO: 11786 - protein, 175 aa, Homo Sapiens
  misc_feature (1)..(1): Xaa can be any naturally occurring amino acid
XLGSRDSALLWQLLVLLCRQNGSMVGSDIAELLMQDCKKLEKYKRQPPVANLINLTDEDWPVLSSGTPNLLTGEIPPSVETPAQIVEKFTRLLYYGRKKCCGEKQWGDWRPHLAVILSNQAGDPELYQRAIVAIGDTLAGKGLVEAAHFCYLMAHVPFGHYTVKTDHLVLLGSSH

SEQ ID NO: 11787 - protein, 107 aa, Homo Sapiens
MSVIFFACVVRVRDGLPLSASTDFYHTQDFLEWRRRLKSLALRLAQYPGRGSAEGCDFSIHFSSFGDVACMAICSCQCPAAMAFCFLETLWWEFTASYDTTCIGLAS

SEQ ID NO: 11788 - protein, 142 aa, Homo Sapiens
MSVIFFACVVRVRDGLPLSASTDFYHTQDFLEWRRRLKSLALRLAQYPGRGSAEGCDFSIHFSSFGDVACMAICSCQCPAAMAFCFLETLWWEFTASYDTTCIGLASRPYAFLEFDSIIQKVKWHFNYVSSSQMECSLEKIQ

SEQ ID NO: 11789 - protein, 228 aa, Homo Sapiens
MSVIFFACVVRVRDGLPLSASTDFYHTQDFLEWRRRLKSLALRLAQYPGRGSAEGCDFSIHFSSFGDVACMAICSCQCPAAMAFCFLETLWWEFTASYDTTCIGLASRPYAFLEFDSIIQKVKWHFNYVSSSQMECSLEKIQEELKLQPPAVLTLEDTDVANGVMNGHTPMHLEPAPNFRMEPVTALGILSLILNIMCAALNLIRGVHLAEHSLQDPRSWFCWLDQTS

SEQ ID NO: 11790 - protein, 236 aa, Homo Sapiens
MSVIFFACVVRVRDGLPLSASTDFYHTQDFLEWRRRLKSLALRLAQYPGRGSAEGCDFSIHFSSFGDVACMAICSCQCPAAMAFCFLETLWWEFTASYDTTCIGLASRPYAFLEFDSIIQKVKWHFNYVSSSQMECSLEKIQEELKLQPPAVLTLEDTDVANGVMNGHTPMHLEPAPNFRMEPVTALGILSLILNIMCAALNLIRGVHLAEHSLQVAHEEIGNILAFLVPFVACIF

SEQ ID NO: 11791 - protein, 303 aa, Homo Sapiens
MSVIFFACVVRVRDGLPLSASTDFYHTQDFLEWRRRLKSLALRLAQYPGRGSAEGCDFSIHFSSFGDVACMAICSCQCPAAMAFCFLETLWWEFTASYDTTCIGLASRPYAFLEFDSIIQKVKWHFNYVSSSQMECSLEKIQEELKLQPPAVLTLEDTDVANGVMNGHTPMHLEPAPNFRMEPVTALGILSLILNIMCAALNLIRGVHLAEHSLQVAHEEIGNILAFLVPFVACIFQCYLYLFYSPARTMKVVLMLLFICLGNMYLHGLRNLWQILFHIGVAFLSSYQILTRQLQEKQSDCGV

SEQ ID NO: 11792 - protein, 250 aa, Homo Sapiens
MSVIFFACVVRVRDGLPLSASTDFYHTQDFLEWRRRLKSLALRLAQYPGRGSAEGCDFSIHFSSFGDVACMAICSCQCPAAMAFCFLETLWWEFTASYDTTCIGLASRPYAFLEFDSIIQKVKWHFNYVSSSQMECSLEKIQEELKLQPPAVLTLEDTDVANGVMNGHTPMHLEPAPNFRMEPVTALGILSLILNIMCAALNLIRGVHLAEHSLQVAHEEIGNILAFLVPFVACIFQDPRSWFCWLDQTS

SEQ ID NO: 11793 - protein, 250 aa, Homo Sapiens; identical to SEQ ID NO: 11792

SEQ ID NO: 11794 - protein, 61 aa, Homo Sapiens
MSVIFFACVVRVRDGLPLSASTDFYHTQDFLEWRRRLKSLALRLAQYPGRGSAEGCDFSIQ

SEQ ID NO: 11795 - protein, 72 aa, Homo Sapiens
MSVIFFACVVRVRDGLPLSASTDFYHTQDFLEWRRRLKSLALRLAQYPGRGSAEGCDFSIQDKVLPCCPGWS

SEQ ID NO: 11796 - protein, 72 aa, Homo Sapiens; identical to SEQ ID NO: 11795

SEQ ID NO: 11797 - protein, 143 aa, Homo Sapiens
MSVIFFACVVRVRDGLPLSASTDFYHTQDFLEWRRRLKSLALRLAQYPGRGSAEGCDFSIQHFKGSGRKTVSGIGRTEETIYLQQTATGLFKAKQVQNSVFLLSGTWPAWLSAPASVQQPWPSASWRPCGGNSQLPMTLPALA

SEQ ID NO: 11798 - protein, 75 aa, Homo Sapiens
MSVIFFACVVRVRDGLPLSASTDFYHTQDFLEWRRRLKSLALRLAQYPGRGSAEGCDFSIQLLDILKEAEERQSQ

SEQ ID NO: 11799 - protein, 225 aa, Homo Sapiens
  misc_feature (1)..(1): Xaa can be any naturally occurring amino acid
XAAMAFCFLETLWWEFTASYDTTCIGLASRPYAFLEFDSIIQKVKWHFNYVSSSQMECSLEKIQEELKLQPPAVLTLEDTDVANGVMNGHTPMHLEPAPNFRMEPVTALGILSLILNIMCAALNLIRGVHLAEHSLQVAHEEIGNILAFLVPFVACIFQCYLYLFYSPARTMKVVLMLLFICLGNMYLHGLRNLWQILFHIGVAFLSSYQILTRQLQEKQSDCGV

SEQ ID NO: 11800 - protein, 286 aa, Homo Sapiens
FGGKLVTFENVRMPSHQGAEQQQQQHHVFISQVVTEKEFLSRSDQLQQAVQSQGFINYCQKKIDASQTEFEKNVWSFLKVNFEDDSRGKYLELLGYRKEDLGKKALKDSDQVAQSDGEESPAAEEQLLGEHIKEEKEESEFLPSSGGTFNISVSGDIDGLITQALLTGNFESAVDLCLHDNRMADAIILAIAGGQELLARTQKKYFAKSQSKITRLITAVVMKNWKEIVESCDLKNWREALAAVLTYAKPDEFSALCDLLGTRLENEGDSLLQTQACLCYICAGNV

SEQ ID NO: 11801 - protein, 11 aa, Homo Sapiens
MKLKEVDRTAM

SEQ ID NO: 11802 - protein, 27 aa, Homo Sapiens
MKLKEVDRTAMQAWSPAQNHPIYLATG

SEQ ID NO: 11803 - protein, 65 aa, Homo Sapiens
MKLKEVDRTAMQAWSPAQNHPIYLATGTSAQQLDATFSTNASLEIFELDLSDPSLDMKSCATFSS

SEQ ID NO: 11804 - protein, 66 aa, Homo Sapiens
MKLKEVDRTAMQAWSPAQNHPIYLATGTSAQQLDATFSTNASLEIFELDLSDPSLDMKSCATFSSS

SEQ ID NO: 11805 - protein, 81 aa, Homo Sapiens
MKLKEVDRTAMQAWSPAQNHPIYLATGTSAQQLDATFSTNASLEIFELDLSDPSLDMKSCATFSSSHRYHKLIWGPYKMDS

SEQ ID NO: 11806 - protein, 92 aa, Homo Sapiens
MKLKEVDRTAMQAWSPAQNHPIYLATGTSAQQLDATFSTNASLEIFELDLSDPSLDMKSCATFSSSHRYHKLIWGPYKMDSKGDVSGVLIAD

SEQ ID NO: 11807 - protein, 165 aa, Homo Sapiens
MKLKEVDRTAMQAWSPAQNHPIYLATGTSAQQLDATFSTNASLEIFELDLSDPSLDMKSCATFSSSHRYHKLIWGPYKMDSKGDVSGVLIAGGENGNIILYDPSKIIAGDKEVVIAQNDKHTGPVRALDVNIFQTNLVASGANESEIYIWDLNNFATPMTPGAKT

SEQ ID NO: 11808 - protein, 166 aa, Homo Sapiens
MKLKEVDRTAMQAWSPAQNHPIYLATGTSAQQLDATFSTNASLEIFELDLSDPSLDMKSCATFSSSHRYHKLIWGPYKMDSKGDVSGVLIAGGENGNIILYDPSKIIAGDKEVVIAQNDKHTGPVRALDVNIFQTNLVASGANESEIYIWDLNNFATPMTPGAKTQ

SEQ ID NO: 11809 - protein, 1106 aa, Homo Sapiens
MKLKEVDRTAMQAWSPAQNHPIYLATGTSAQQLDATFSTNASLEIFELDLSDPSLDMKSCATFSSSHRYHKLIWGPYKMDSKGDVSGVLIAGGENGNIILYDPSKIIAGDKEVVIAQNDKHTGPVRALDVNIFQTNLVASGANESEIYIWDLNNFATPMTPGAKTQPPEDISCIAWNRQVQHILASASPSGRATVWDLRKNEPIIKVSDHSNRMHCSGLAWHPDVATQMVLASEDDRLPVIQMWDLRFASSPLRVLENHARGILAIAWSMADPELLLSCGKDAKILCSNPNTGEVLYELPTNTQWCFDIQWCPRNPAVLSAASFDGRISVYSIMGGSTDGLRQKQVDKLSSSFGNLDPFGTGQPLPPLQIPQQTAQHSIVLPLKKPPKWIRRPVGASFSFGGKLVTFENVRMPSHQGAEQQQQQHHVFISQVVTEKEFLSRSDQLQQAVQSQGFINYCQKKIDASQTEFEKNVWSFLKVNFEDDSRGKYLELLGYRKEDLGKKIALALNKVDGANVALKDSDQVAQSDGEESPAAEEQLLGEHIKEEKEESEFLPSSGGTFNISVSGDIDGLITQALLTGNFESAVDLCLHDNRMADAIILAIAGGQELLARTQKKYFAKSQSKITRLITAVVMKNWKEIVESCDLKNWREALAAVLTYAKPDEFSALCDLLGTRLENEGDSLLQTQACLCYICAGNVEKLVACWTKAQDGSHPLSLQDLIEKVVILRKAVQLTQAMDTSTVGVLLAAKMSQYANLLAAQGSIAAALAFLPDNTNQPNIMQLRDRLCRAQGEPVAGHESPKIPYEKQQLPKGRPGPVAGHHQMPRVQTQQYYPHGENPPPPGFIMHGNVNPNAAGQLPTSPGHMHTQVPPYPQPQRPQNGWNDPPALNRVPKKKKMPENFMPPVPITSPIMNPLGDPQSQMLQQQPSAPVPLSSQSSFPQPHLPGGQPFHGVQQPLGQTGMPPSFSKPNIEGAPGAPIGNTFQHVQSLPTKKITKKPIPDEHLILKTTFEDLIQRCLSSATDPQTKRKLDDASKRLEFLYDKLREQTLSPTITSGLHNIARSIETRNYSEGLTMHTHIVSTSNFSETSAFMPVLKVVLTQANKLGV

SEQ ID NO: 11810 - protein, 1181 aa, Homo Sapiens
MKLKEVDRTAMQAWSPAQNHPIYLATGTSAQQLDATFSTNASLEIFELDLSDPSLDMKSCATFSSSHRYHKLIWGPYKMDSKGDVSGVLIAGGENGNIILYDPSKIIAGDKEVVIAQNDKHTGPVRALDVNIFQTNLVASGANESEIYIWDLNNFATPMTPGAKTQPPEDISCIAWNRQVQHILASASPSGRATVWDLRKNEPIIKVSDHSNRMHCSGLAWHPDVATQMVLASEDDRLPVIQMWDLRFASSPLRVLENHARGILAIAWSMADPELLLSCGKDAKILCSNPNTGEVLYELPTNTQWCFDIQWCPRNPAVLSAASFDGRISVYSIMGGSTDGLRQKQVDKLSSSFGNLDPFGTGQPLPPLQIPQQTAQHSIVLPLKKPPKWIRRPVGASFSFGGKLVTFENVRMPSHQGAEQQQQQHHVFISQVVTEKEFLSRSDQLQQAVQSQGFINYCQKKIDASQTEFEKNVWSFLKVNFEDDSRGKYLELLGYRKEDLGKKHIKEEKEESEFLPSSGGTFNISVSGDIDGLITQALLTGNFESAVDLCLHDNRMADAIILAIAGGQELLARTQKKYFAKSQSKITRLITAVVMKNWKEIVESCDLKNWREALAAVLTYAKPDEFSALCDLLGTRLENEGDSLLQTQACLCYICAGNVEKLVACWTKAQDGSHPLSLQDLIEKVVILRKAVQLTQAMDTSTVGVLLAAKMSQYANLLAAQGSIAAALAFLPDNTNQPNIMQLRDRLCRAQGEPVAGHESPKIPYEKQQLPKGRPGPVAGHHQMPRVQTQQYYPHGENPPPPGFIMHGNVNPNAAGQLPTSPGHMHTQVPPYPQPQPYQPAQPYPFGTGGSAMYRPQQPVAPPTSNAYPNTPYISSASSYTGQSQLYAAQHQASSPTSSPATSFPPPPSSGASFQHGGPGAPPSSSAYALPPGTTGTLPAASELPASQRTGPQNGWNDPPALNRVPKKKKMPENFMPPVPITSPIMNPLGDPQSQMLQQQPSAPVPLSSQSSFPQPHLPGGQPFHGVQQPLGQTGMPPSFSKPNIEGAPGAPIGNTFQHVQSLPTKKITKKPIPDEHLILKTTFEDLIQRCLSSATDPQTKRKLDDASKRLEFLYDKLREQTLSPTITSGLHNIARSIETRNYSEGLTMHTHIVSTSNFSETSAFMPVLKVVLTQANKLGV

SEQ ID NO: 11811 - protein, 1220 aa, Homo Sapiens
MKLKEVDRTAMQAWSPAQNHPIYLATGTSAQQLDATFSTNASLEIFELDLSDPSLDMKSCATFSSSHRYHKLIWGPYKMDSKGDVSGVLIAGGENGNIILYDPSKIIAGDKEVVIAQNDKHTGPVRALDVNIFQTNLVASGANESEIYIWDLNNFATPMTPGAKTQPPEDISCIAWNRQVQHILASASPSGRATVWDLRKNEPIIKVSDHSNRMHCSGLAWHPDVATQMVLASEDDRLPVIQMWDLRFASSPLRVLENHARGILAIAWSMADPELLLSCGKDAKILCSNPNTGEVLYELPTNTQWCFDIQWCPRNPAVLSAASFDGRISVYSIMGGSTDGLRQKQVDKLSSSFGNLDPFGTGQPLPPLQIPQQTAQHSIVLPLKKPPKWIRRPVGASFSFGGKLVTFENVRMPSHQGAEQQQQQHHVFISQVVTEKEFLSRSDQLQQAVQSQGFINYCQKKIDASQTEFEKNVWSFLKVNFEDDSRGKYLELLGYRKEDLGKKIALALNKVDGANVALKDSDQVAQSDGEESPAAEEQLLGEHIKEEKEESEFLPSSGGTFNISVSGDIDGLITQALLTGNFESAVDLCLHDNRMADAIILAIAGGQELLARTQKKYFAKSQSKITRLITAVVMKNWKEIVESCDLKNWREALAAVLTYAKPDEFSALCDLLGTRLENEGDSLLQTQACLCYICAGNVEKLVACWTKAQDGSHPLSLQDLIEKVVILRKAVQLTQAMDTSTVGVLLAAKMSQYANLLAAQGSIAAALAFLPDNTNQPNIMQLRDRLCRAQGEPVAGHESPKIPYEKQQLPKGRPGPVAGHHQMPRVQTQQYYPHGENPPPPGFIMHGNVNPNAAGQLPTSPGHMHTQVPPYPQPQPYQPAQPYPFGTGGSAMYRPQQPVAPPTSNAYPNTPYISSASSYTGQSQLYAAQHQASSPTSSPATSFPPPPSSGASFQHGGPGAPPSSSAYALPPGTTGTLPAASELPASQRTGPQNGWNDPPALNRVPKKKKMPENFMPPVPITSPIMNPLGDPQSQMLQQQPSAPVPLSSQSSFPQPHLPGGQPFHGVQQPLGQTGMPPSFSKPNIEGAPGAPIGNTFQHVQSLPTKKITKKPIPDEHLILKTTFEDLIQRCLSSATDPQTKRKLDDASKRLEFLYDKLREQTLSPTITSGLHNIARSIETRNYSEGLTMHTHIVSTSNFSETSAFMPVLKVVLTQANKLGV

SEQ ID NO: 11812 - protein, 1220 aa, Homo Sapiens; identical to SEQ ID NO: 11811

SEQ ID NO: 11813 - protein, 1220 aa, Homo Sapiens; identical to SEQ ID NO: 11811

SEQ ID NO: 11814 - protein, 1251 aa, Homo Sapiens
MKLKEVDRTAMQAWSPAQNHPIYLATGTSAQQLDATFSTNASLEIFELDLSDPSLDMKSCATFSSSHRYHKLIWGPYKMDSKGDVSGVLIAGGENGNIILYDPSKIIAGDKEVVIAQNDKHTGPVRALDVNIFQTNLVASGANESEIYIWDLNNFATPMTPGAKTQPPEDISCIAWNRQVQHILASASPSGRATVWDLRKNEPIIKVSDHSNRMHCSGLAWHPDVATQMVLASEDDRLPVIQMWDLRFASSPLRVLENHARGILAIAWSMADPELLLSCGKDAKILCSNPNTGEVLYELPTNTQWCFDIQWCPRNPAVLSAASFDGRISVYSIMGGSTDGLRQKQVDKLSSSFGNLDPFGTGQPLPPLQIPQQTAQHSIVLPLKKPPKWIRRPVGASFSFGGKLVTFENVRMPSHQGAEQQQQQHHVFISQVVTEKEFLSRSDQLQQAVQSQGFINYCQKKIDASQTEFEKNVWSFLKVNFEDDSRGKYLELLGYRKEDLGKKIALALNKVDGANVALKDSDQVAQSDGEESPAAEEQLLGEHIKEEKEESEFLPSSGGTFNISVSGDIDGLITQALLTGNFESAVDLCLHDNRMADAIILAIAGGQELLARTQKKYFAKSQSKITRLITAVVMKNWKEIVESCDLKNWREALAAVLTYAKPDEFSALCDLLGTRLENEGDSLLQTQACLCYICAGNVEKLVACWTKAQDGSHPLSLQDLIEKVVILRKAVQLTQAMDTSTVGVLLAAKMSQYANLLAAQGSIAAALAFLPDNTNQPNIMQLRDRLCRAQGEPVAGHESPKIPYEKQQLPKGRPGPVAGHHQMPRVQTQQYYPHVRIAPTVTTWSNKTPTALPSHPPAASPSDTQGENPPPPGFIMHGNVNPNAAGQLPTSPGHMHTQVPPYPQPQPYQPAQPYPFGTGGSAMYRPQQPVAPPTSNAYPNTPYISSASSYTGQSQLYAAQHQASSPTSSPATSFPPPPSSGASFQHGGPGAPPSSSAYALPPGTTGTLPAASELPASQRTGPQNGWNDPPALNRVPKKKKMPENFMPPVPITSPIMNPLGDPQSQMLQQQPSAPVPLSSQSSFPQPHLPGGQPFHGVQQPLGQTGMPPSFSKPNIEGAPGAPIGNTFQHVQSLPTKKITKKPIPDEHLILKTTFEDLIQRCLSSATDPQTKRKLDDASKRLEFLYDKLREQTLSPTITSGLHNIARSIETRNYSEGLTMHTHIVSTSNFSETSAFMPVLKVVLTQANKLGV

SEQ ID NO: 11815 - protein, 1067 aa, Homo Sapiens
MKLKEVDRTAMQAWSPAQNHPIYLATGTSAQQLDATFSTNASLEIFELDLSDPSLDMKSCATFSSSHRYHKLIWGPYKMDSKGDVSGVLIAGGENGNIILYDPSKIIAGDKEVVIAQNDKHTGPVRALDVNIFQTNLVASGANESEIYIWDLNNFATPMTPGAKTQPPEDISCIAWNRQVQHILASASPSGRATVWDLRKNEPIIKVSDHSNRMHCSGLAWHPDVATQMVLASEDDRLPVIQMWDLRFASSPLRVLENHARGILAIAWSMADPELLLSCGKDAKILCSNPNTGEVLYELPTNTQWCFDIQWCPRNPAVLSAASFDGRISVYSIMGGSTDGLRQKQVDKLSSSFGNLDPFGTGQPLPPLQIPQQTAQHSIVLPLKKPPKWIRRPVGASFSFGGKLVTFENVRMPSHQGAEQQQQQHHVFISQVVTEKEFLSRSDQLQQAVQSQGFINYCQKKIDASQTEFEKNVWSFLKVNFEDDSRGKYLELLGYRKEDLGKKHIKEEKEESEFLPSSGGTFNISVSGDIDGLITQALLTGNFESAVDLCLHDNRMADAIILAIAGGQELLARTQKKYFAKSQSKITRLITAVVMKNWKEIVESCDLKNWREALAAVLTYAKPDEFSALCDLLGTRLENEGDSLLQTQACLCYICAGNVEKLVACWTKAQDGSHPLSLQDLIEKVVILRKAVQLTQAMDTSTVGVLLAAKMSQYANLLAAQGSIAAALAFLPDNTNQPNIMQLRDRLCRAQGEPVAGHESPKIPYEKQQLPKGRPGPVAGHHQMPRVQTQQYYPHGENPPPPGFIMHGNVNPNAAGQLPTSPGHMHTQVPPYPQPQRPQNGWNDPPALNRVPKKKKMPENFMPPVPITSPIMNPLGDPQSQMLQQQPSAPVPLSSQSSFPQPHLPGGQPFHGVQQPLGQTGMPPSFSKPNIEGAPGAPIGNTFQHVQSLPTKKITKKPIPDEHLILKTTFEDLIQRCLSSATDPQTKRKLDDASKRLEFLYDKLREQTLSPTITSGLHNIARSIETRNYSEGLTMHTHIVSTSNFSETSAFMPVLKVVLTQANKLGV

SEQ ID NO: 11816 - protein, 1106 aa, Homo Sapiens; identical to SEQ ID NO: 11809

SEQ ID NO: 11817 - protein, 1067 aa, Homo Sapiens; identical to SEQ ID NO: 11815

SEQ ID NO: 11818 - protein, 1166 aa, Homo Sapiens
MKLKEVDRTAMQAWSPAQNHPIYLATGTSAQQLDATFSTNASLEIFELDLSDPSLDMKSCATFSSSHRYHKLIWGPYKMDSKGDVSGVLIAGGENGNIILYDPSKIIAGDKEVVIAQNDKHTGPVRALDVNIFQTNLVASGANESEIYIWDLNNFATPMTPGAKTQPPEDISCIAWNRQVQHILASASPSGRATVWDLRKNEPIIKVSDHSNRMHCSGLAWHPDVATQMVLASEDDRLPVIQMWDLRFASSPLRVLENHARGILAIAWSMADPELLLSCGKDAKILCSNPNTGEVLYELPTNTQWCFDIQWCPRNPAVLSAASFDGRISVYSIMGGSTDGLRQKQVDKLSSSFGNLDPFGTGQPLPPLQIPQQTAQHSIVLPLKKPPKWIRRPVGASFSFGGKLVTFENVRMPSHQGAEQQQQQHHVFISQVVTEKEFLSRSDQLQQAVQSQGFINYCQKKIDASQTEFEKNVWSFLKVNFEDDSRGKYLELLGYRKEDLGKKHIKEEKEESEFLPSSGGTFNISVSGDIDGLITQALLTGNFESAVDLCLHDNRMADAIILAIAGGQELLARTQKKYFAKSQSKITRLITAVVMKNWKEIVESCDLKNWREALAAVLTYAKPDEFSALCDLLGTRLENEGDSLLQTQACLCYICAGNVEKLVACWTKAQDGSHPLSLQDLIEKVVILRKAVQLTQAMDTSTVGVLLAAKMSQYANLLAAQGSIAAALAFLPDNTNQPNIMQLRDRLCRAQGEPVAGHESPKIPYEKQQLPKGRPGPVAGHHQMPRVQTQQYYPHGENPPPPGFIMHGNVNPNAAGQLPTSPGHMHTQVPPYPQPQPYQPAQPYPFGTGGSAMYRPQQPVAPPTSNAYPNTPYISSASSYTGQSQLYAAQHQASSPTSSPATSFPPPPSSGASFQHGGPGAPPSSSAYALPPGTTGPQNGWNDPPALNRVPKKKKMPENFMPPVPITSPIMNPLGDPQSQMLQQQPSAPVPLSSQSSFPQPHLPGGQPFHGVQQPLGQTGMPPSFSKPNIEGAPGAPIGNTFQHVQSLPTKKITKKPIPDEHLILKTTFEDLIQRCLSSATDPQTKRKLDDASKRLEFLYDKLREQTLSPTITSGLHNIARSIETRNYSEGLTMHTHIVSTSNFSETSAFMPVLKVVLTQANKLGV

SEQ ID NO: 11819 - protein, 1205 aa, Homo Sapiens
MKLKEVDRTAMQAWSPAQNHPIYLATGTSAQQLDATFSTNASLEIFELDLSDPSLDMKSCATFSSSHRYHKLIWGPYKMDSKGDVSGVLIAGGENGNIILYDPSKIIAGDKEVVIAQNDKHTGPVRALDVNIFQTNLVASGANESEIYIWDLNNFATPMTPGAKTQPPEDISCIAWNRQVQHILASASPSGRATVWDLRKNEPIIKVSDHSNRMHCSGLAWHPDVATQMVLASEDDRLPVIQMWDLRFASSPLRVLENHARGILAIAWSMADPELLLSCGKDAKILCSNPNTGEVLYELPTNTQWCFDIQWCPRNPAVLSAASFDGRISVYSIMGGSTDGLRQKQVDKLSSSFGNLDPFGTGQPLPPLQIPQQTAQHSIVLPLKKPPKWIRRPVGASFSFGGKLVTFENVRMPSHQGAEQQQQQHHVFISQVVTEKEFLSRSDQLQQAVQSQGFINYCQKKIDASQTEFEKNVWSFLKVNFEDDSRGKYLELLGYRKEDLGKKIALALNKVDGANVALKDSDQVAQSDGEESPAAEEQLLGEHIKEEKEESEFLPSSGGTFNISVSGDIDGLITQALLTGNFESAVDLCLHDNRMADAIILAIAGGQELLARTQKKYFAKSQSKITRLITAVVMKNWKEIVESCDLKNWREALAAVLTYAKPDEFSALCDLLGTRLENEGDSLLQTQACLCYICAGNVEKLVACWTKAQDGSHPLSLQDLIEKVVILRKAVQLTQAMDTSTVGVLLAAKMSQYANLLAAQGSIAAALAFLPDNTNQPNIMQLRDRLCRAQGEPVAGHESPKIPYEKQQLPKGRPGPVAGHHQMPRVQTQQYYPHGENPPPPGFIMHGNVNPNAAGQLPTSPGHMHTQVPPYPQPQPYQPAQPYPFGTGGSAMYRPQQPVAPPTSNAYPNTPYISSASSYTGQSQLYAAQHQASSPTSSPATSFPPPPSSGASFQHGGPGAPPSSSAYALPPGTTGPQNGWNDPPALNRVPKKKKMPENFMPPVPITSPIMNPLGDPQSQMLQQQPSAPVPLSSQSSFPQPHLPGGQPFHGVQQPLGQTGMPPSFSKPNIEGAPGAPIGNTFQHVQSLPTKKITKKPIPDEHLILKTTFEDLIQRCLSSATDPQTKRKLDDASKRLEFLYDKLREQTLSPTITSGLHNIARSIETRNYSEGLTMHTHIVSTSNFSETSAFMPVLKVVLTQANKLGV

SEQ ID NO: 11820 - protein, 877 aa, Homo Sapiens
MKLKEVDRTAMQAWSPAQNHPIYLATGTSAQQLDATFSTNASLEIFELDLSDPSLDMKSCATFSSSHRYHKLIWGPYKMDSKGDVSGVLIAGGENGNIILYDPSKIIAGDKEVVIAQNDKHTGPVRALDVNIFQTNLVASGANESEIYIWDLNNFATPMTPGAKTQPPEDISCIAWNRQVQHILASASPSGRATVWDLRKNEPIIKVSDHSNRMHCSGLAWHPDVATQMVLASEDDRLPVIQMWDLRFASSPLRVLENHARGILAIAWSMADPELLLSCGKDAKILCSNPNTGEVLYELPTNTQWCFDIQWCPRNPAVLSAASFDGRISVYSIMGGSTDGLRQKQVDKLSSSFGNLDPFGTGQPLPPLQIPQQTAQHSIVLPLKKPPKWIRRPVGASFSFGGKLVTFENVRMPSHQGAEQQQQQHHVFISQVVTEKEFLSRSDQLQQAVQSQGFINYCQKKIDASQTEFEKNVWSFLKVNFEDDSRGKYLELLGYRKEDLGKKIALALNKVDGANVALKDSDQVAQSDGEESPAAEEQLLGEHIKEEKEESEFLPSSGGTFNISVSGDIDGLITQALLTGNFESAVDLCLHDNRMADAIILAIAGGQELLARTQKKYFAKSQSKITRLITAVVMKNWKEIVESCDLKNWREALAAVLTYAKPDEFSALCDLLGTRLENEGDSLLQTQACLCYICAGNVEKLVACWTKAQDGSHPLSLQDLIEKVVILRKAVQLTQAMDTSTVGVLLAAKMSQYANLLAAQGSIAAALAFLPDNTNQPNIMQLRDRLCRAQGEPVAGHESPKIPYEKQQLPKGRPGPVAGHHQMPRVQTQQYYPHGENPPPPGFIMHGNVNPNAAGQLPTSPGHMHTQVPPYPQPQRK

SEQ ID NO: 11821 - protein, 68 aa, Homo Sapiens
MKLKEVDRTAMQAWSPAQNHPIYLATGTSAQQLDATFSTNASLEIFELDLSDPSLDMKSCATFSSSHS

SEQ ID NO: 11822 - protein, 1200 aa, Homo Sapiens
MLGESDERCTNAGSGCRRSSPGTSAQQLDATFSTNASLEIFELDLSDPSLDMKSCATFSSSHRYHKLIWGPYKMDSKGDVSGVLIAGGENGNIILYDPSKIIAGDKEVVIAQNDKHTGPVRALDVNIFQTNLVASGANESEIYIWDLNNFATPMTPGAKTQPPEDISCIAWNRQVQHILASASPSGRATVWDLRKNEPIIKVSDHSNRMHCSGLAWHPDVATQMVLASEDDRLPVIQMWDLRFASSPLRVLENHARGILAIAWSMADPELLLSCGKDAKILCSNPNTGEVLYELPTNTQWCFDIQWCPRNPAVLSAASFDGRISVYSIMGGSTDGLRQKQVDKLSSSFGNLDPFGTGQPLPPLQIPQQTAQHSIVLPLKKPPKWIRRPVGASFSFGGKLVTFENVRMPSHQGAEQQQQQHHVFISQVVTEKEFLSRSDQLQQAVQSQGFINYCQKKIDASQTEFEKNVWSFLKVNFEDDSRGKYLELLGYRKEDLGKKIALALNKVDGANVALKDSDQVAQSDGEESPAAEEQLLGEHIKEEKEESEFLPSSGGTFNISVSGDIDGLITQALLTGNFESAVDLCLHDNRMADAIILAIAGGQELLARTQKKYFAKSQSKITRLITAVVMKNWKEIVESCDLKNWREALAAVLTYAKPDEFSALCDLLGTRLENEGDSLLQTQACLCYICAGNVEKLVACWTKAQDGSHPLSLQDLIEKVVILRKAVQLTQAMDTSTVGVLLAAKMSQYANLLAAQGSIAAALAFLPDNTNQPNIMQLRDRLCRAQGEPVAGHESPKIPYEKQQLPKGRPGPVAGHHQMPRVQTQQYYPHGENPPPPGFIMHGNVNPNAAGQLPTSPGHMHTQVPPYPQPQPYQPAQPYPFGTGGSAMYRPQQPVAPPTSNAYPNTPYISSASSYTGQSQLYAAQHQASSPTSSPATSFPPPPSSGASFQHGGPGAPPSSSAYALPPGTTGPQNGWNDPPALNRVPKKKKMPENFMPPVPITSPIMNPLGDPQSQMLQQQPSAPVPLSSQSSFPQPHLPGGQPFHGVQQPLGQTGMPPSFSKPNIEGAPGAPIGNTFQHVQSLPTKKITKKPIPDEHLILKTTFEDLIQRCLSSATDPQTKRKLDDASKRLEFLYDKLREQTLSPTITSGLHNIARSIETRNYSEGLTMHTHIVSTSNFSETSAFMPVLKVVLTQANKLGV

SEQ ID NO: 11823 - protein, 969 aa, Homo Sapiens
MVKLVLLSIVLLKVTVPKLSNDLLQLDFMPIHRGILAIAWSMADPELLLSCGKDAKILCSNPNTGEVLYELPTNTQWCFDIQWCPRNPAVLSAASFDGRISVYSIMGGSTDGLRQKQVDKLSSSFGNLDPFGTGQPLPPLQIPQQTAQHSIVLPLKKPPKWIRRPVGASFSFGGKLVTFENVRMPSHQGAEQQQQQHHVFISQVVTEKEFLSRSDQLQQAVQSQGFINYCQKKIDASQTEFEKNVWSFLKVNFEDDSRGKYLELLGYRKEDLGKKHIKEEKEESEFLPSSGGTFNISVSGDIDGLITQALLTGNFESAVDLCLHDNRMADAIILAIAGGQELLARTQKKYFAKSQSKITRLITAVVMKNWKEIVESCDLKNWREALAAVLTYAKPDEFSALCDLLGTRLENEGDSLLQTQACLCYICAGNVEKLVACWTKAQDGSHPLSLQDLIEKVVILRKAVQLTQAMDTSTVGVLLAAKMSQYANLLAAQGSIAAALAFLPDNTNQPNIMQLRDRLCRAQGEPVAGHESPKIPYEKQQLPKGRPGPVAGHHQMPRVQTQQYYPHVRIAPTVTTWSNKTPTALPSHPPAASPSDTQGENPPPPGFIMHGNVNPNAAGQLPTSPGHMHTQVPPYPQPQPYQPAQPYPFGTGGSAMYRPQQPVAPPTSNAYPNTPYISSASSYTGQSQLYAAQHQASSPTSSPATSFPPPPSSGASFQHGGPGAPPSSSAYALPPGTTGPQNGWNDPPALNRVPKKKKMPENFMPPVPITSPIMNPLGDPQSQMLQQQPSAPVPLSSQSSFPQPHLPGGQPFHGVQQPLGQTGMPPSFSKPNIEGAPGAPIGNTFQHVQSLPTKKITKKPIPDEHLILKTTFEDLIQRCLSSATDPQTKRKLDDASKRLEFLYDKLREQTLSPTITSGLHNIARSIETRNYSEGLTMHTHIVSTSNFSETSAFMPVLKVVLTQANKLGV

SEQ ID NO: 11824 - protein, 235 aa, Homo Sapiens
TQDPAAEGPRQQDEVKGSRSYSHAGMEPCPESPHLPSNRYHKLIWGPYKMDSKGDVSGVLIAGGENGNIILYDPSKIIAGDKEVVIAQNDKHTGPVRALDVNIFQTNLVASGANESEIYIWDLNNFATPMTPGAKTQPPEDISCIAWNRQVQHILASASPSGRATVWDLRKNEPIIKVSDHSNRMHCSGLAWHPDVATQMVLASEDDRLPVIQMWDLRFASSPLRVLENHARYRA

SEQ ID NO: 11825 - protein, 237 aa, Homo Sapiens
  misc_feature (1)..(1): Xaa can be any naturally occurring amino acid
XAVQSQGFINYCQKKIDASQTEFEKNVWSFLKVNFEDDSRGKYLELLGYRKEDLGKKHIKEEKEESEFLPSSGGTFNISVSGDIDGLITQALLTGNFESAVDLCLHDNRMADAIILAIAGGQELLARTQKKYFAKSQSKITRLITAVVMKNWKEIVESCDLKNWREALAAVLTYAKPDEFSALCGNVEKLVACWTKAQDGSHPLSLQDLIEKVVILRKAVQLTQAMDTSTVGVLLAA

SEQ ID NO: 11826 - protein, 443 aa, Homo Sapiens
  misc_feature (1)..(1): Xaa can be any naturally occurring amino acid
XFGTGQPLPPLQIPQQTAQHSIVLPLKKPPKWIRRPVGASFSFGGKLVTFENVRMPSHQGAEQQQQQHHVFISQVVTEKEFLSRSDQLQQAVQSQGFINYCQKKIDASQTEFEKNVWSFLKVNFEDDSRGKYLELLGYRKEDLGKKIALALNKVDGANVHIKEEKEESEFLPSSGGTFNISVSGDIDGLITQALLTGNFESAVDLCLHDNRMADAIILAIAGGQELLARTQKKYFAKSQSKITRLITAVVMKNWKEIVESCDLKNWREALAAVLTYAKPDEFSALCDLLGTRLENEGDSLLQTQACLCYICAGNVEKLVACWTKAQDGSHPLSLQDLIEKVVILRKAVQLTQAMDTSTVGVLLAAKMSQYANLLAAQGSIAAALAFLPDNTNQPNIMQLRDRLCRAQGEPVAGHESPKIPYEKQQLPKGRPGPVAGHHQMPRV

SEQ ID NO: 11827 - protein, 383 aa, Homo Sapiens
  misc_feature (1)..(1): Xaa can be any naturally occurring amino acid
XNAAGQLPTSPGHMHTQVPPYPQPQPYQPAQPYPFGTGGSAMYRPQQPVAPPTSNAYPNTPYISSASSYTGQSQLYAAQHQASSPTSSPATSFPPPPSSGASFQHGGPGAPPSSSAYALPPGTTGTLPAASELPASQRTENQSIQDQAPMLEGPQNGWNDPPALNRVPKKKKMPENFMPPVPITSPIMNPLGDPQSQMLQQQPSAPVPLSSQSSFPQPHLPGGQPFHGVQQPLGQTGMPPSFSKPNIEGAPGAPIGNTFQHVQSLPTKKITKKPIPDEHLILKTTFEDLIQRCLSSATDPQTKRKLDDASKRLEFLYDKLREQTLSPTITSGLHNIARSIETRNYSEGLTMHTHIVSTSNFSETSAFMPVLKVVLTQANKLGV

SEQ ID NO: 11828 - protein, 181 aa, Homo Sapiens
  misc_feature (1)..(1): Xaa can be any naturally occurring amino acid
XPVPITSPIMNPLGDPQSQMLQQQPSAPVPLSSQSSFPQPHLPGGQPFHGVQQPLGQTGMPPSFSKPNIEGAPGAPIGNTFQHVQSLPTKKITKKPIPDEHLILKTTFEDLIQRCLSSATDPLSPTITSGLHNIARSIETRNYSEGLTMHTHIVSTSNFSETSAFMPVLKVVLTQANKLGV

SEQ ID NO: 11829 - protein, 219 aa, Homo Sapiens
  misc_feature (1)..(1): Xaa can be any naturally occurring amino acid
XQMPRVQTQQYYPHVRIAPTVTTWSNKTPTALPSHPPAASPSDTQGENPPPPGFIMHGNVNPNAAGQLPTSPGHMHTQVPPYPQPQRPQNGWNDPPALNRVPKKKKMPENFMPPVPITSPIMNPLGDPQSQMLQQQPSAPVPLSSQSSFPQPHLPGGQPFHGVQQPLGQTGMPPSFSKPNIEGAPGAPIGNTFQHVQSLPTKKITKKPIPDEHLILKTT

SEQ ID NO: 11830 - protein, 275 aa, Homo Sapiens
GTISSEIKSARGSHHLSIYAENSLKSDGYHKRTDRKSRIIAKNVSTSKPEFEFTTLDFPELQGAENNMSEIQKQPKWGPVHSVSTDISLLREVVKPAAVLSKGEIVVKNNPNESVTANAATNSPSCTRADPKNVSIPSSEALSSDPSYNKEKHIIHPTQKSKASQGSDLEQNEASRKNKKKKEKSTSKYEVLTVQEPPRIEDAEEFPNLAVASERRDRIETPKFQSKQQPQDNFKNNVKKSQLPVQLDLGGMLTALEKKQHSQHAKQSSKPVVVS

SEQ ID NO: 11831 - protein, 786 aa, Homo Sapiens
MAFGASTFPPQYLSSEITLHPYAYSPYTLDSTQNVYSVPGSQYLYNQPSCYRGFQTVKHRNENTCPLPQEMKALFKKKTYDEKKTYDQQKFDSERADGTISSEIKSARGSHHLSIYAENSLKSDGYHKRTDRKSRIIAKNVSTSKPEFEFTTLDFPELQGAENNMSEIQKQPKWGPVHSVSTDISLLREVVKPAAVLSKGEIVVKNNPNESVTANAATNSPSCTRELSWTPMGYVVRQTLSTELSAAPKNVTSMINLKTIASSADPKNVSIPSSEALSSDPSYNKEKHIIHPTQKSKASQGSDLEQNEASRKNKKKKEKSTSKYEVLTVQEPPRIEDAEEFPNLAVASERRDRIETPKFQSKQQPQDNFKNNVKKSQLPVQLDLGGMLTALEKKQHSQHAKQSSKPVVVSVGAVPVLSKECASGERGRRMSQMKTPHNPLDSSAPLMKKGKQREIPKAKKPTSLKKIILKERQERKQRLQENAVSPAFTSDDTQDGESGGDDQFPEQAELSGPEGMDELISTPSVEDKSEEPPGTELQRDTEASHLAPNHTTFPKIHSRRFRDYCSQMLSKEVDACVTDLLKELVRFQDRMYQKDPVKAKTKRRLVLGLREVLKHLKLKKLKCVIISPNCEKIQSKGGLDDTLHTIIDYACEQNIPFVFALNRKALGRSLNKAVPVSVVGIFSYDGAQDQFHKMVELTVAARQAYKTMLENVQQELVGEPRPQAPPSLPTQGPSCPAEDGPPALKEKEEPHYIEIWKKHLEAYSGCTLELEESLEASTSQMMNLNL

SEQ ID NO: 11832 - protein, 854 aa, Homo Sapiens
MASEGPREPESEGIKLSADVKPFVPRFAGLNVAWLESSEACVFPSSAATYYPFVQEPPVTEQKIYTEDMAFGASTFPPQYLSSEITLHPYAYSPYTLDSTQNVYSVPGSQYLYNQPSCYRGFQTVKHRNENTCPLPQEMKALFKKKTYDEKKTYDQQKFDSERADGTISSEIKSARGSHHLSIYAENSLKSDGYHKRTDRKSRIIAKNVSTSKPEFEFTTLDFPELQGAENNMSEIQKQPKWGPVHSVSTDISLLREVVKPAAVLSKGEIVVKNNPNESVTANAATNSPSCTRELSWTPMGYVVRQTLSTELSAAPKNVTSMINLKTIASSADPKNVSIPSSEALSSDPSYNKEKHIIHPTQKSKASQGSDLEQNEASRKNKKKKEKSTSKYEVLTVQEPPRIEDAEEFPNLAVASERRDRIETPKFQSKQQPQDNFKNNVKKSQLPVQLDLGGMLTALEKKQHSQHAKQSSKPVVVSVGAVPVLSKECASGERGRRMSQMKTPHNPLDSSAPLMKKGKQREIPKAKKPTSLKKIILKERQERKQRLQENAVSPAFTSDDTQDGESGGDDQFPEQAELSGPEGMDELISTPSVEDKSEEPPGTELQRDTEASHLAPNHTTFPKIHSRRFRDYCSQMLSKEVDACVTDLLKELVRFQDRMYQKDPVKAKTKRRLVLGLREVLKHLKLKKLKCVIISPNCEKIQSKGGLDDTLHTIIDYACEQNIPFVFALNRKALGRSLNKAVPVSVVGIFSYDGAQDQFHKMVELTVAARQAYKTMLENVQQELVGEPRPQAPPSLPTQGPSCPAEDGPPALKEKEEPHYIEIWKKHLEAYSGCTLELEESLEASTSQMMNLNL

SEQ ID NO: 11833 - protein, 60 aa, Homo Sapiens
MPLPILLHVQEQILKMLVYHLLKLYLRILPTTKKNTLFILPKSLKHHKVVTLNKMKPQER

SEQ ID NO: 11834 - protein, 781 aa, Homo Sapiens
MVRVLRSMCLPQLCSHILSVCSGTTSDRNVYSVPGSQYLYNQPSCYRGFQTVKHRNENTCPLPQEMKALFKKKTYDEKKTYDQQKFDSERADGTISSEIKSARGSHHLSIYAENSLKSDGYHKRTDRKSRIIAKNVSTSKPEFEFTTLDFPELQGAENNMSEIQKQPKWGPVHSVSTDISLLREVVKPAAVLSKGEIVVKNNPNESVTANAATNSPSCTRELSWTPMGYVVRQTLSTELSAAPKNVTSMINLKTIASSADPKNVSIPSSEALSSDPSYNKEKHIIHPTQKSKASQGSDLEQNEASRKNKKKKEKSTSKYEVLTVQEPPRIEDAEEFPNLAVASERRDRIETPKFQSKQQPQDNFKNNVKKSQLPVQLDLGGMLTALEKKQHSQHAKQSSKPVVVSVGAVPVLSKECASGERGRRMSQMKTPHNPLDSSAPLMKKGKQREIPKAKKPTSLKKIILKERQERKQRLQENAVSPAFTSDDTQDGESGGDDQFPEQAELSGPEGMDELISTPSVEDKSEEPPGTELQRDTEASHLAPNHTTFPKIHSRRFRDYCSQMLSKEVDACVTDLLKELVRFQDRMYQKDPVKAKTKRRLVLGLREVLKHLKLKKLKCVIISPNCEKIQSKGGLDDTLHTIIDYACEQNIPFVFALNRKALGRSLNKAVPVSVVGIFSYDGAQDQFHKMVELTVAARQAYKTMLENVQQELVGEPRPQAPPSLPTQGPSCPAEDGPPALKEKEEPHYIEIWKKHLEAYSGCTLELEESLEASTSQMMNLNL

SEQ ID NO: 11835 - protein, 43 aa, Homo Sapiens
MQTCPLAFPGHVSQALGTLLFLAASLSAQNEAACPRAGERHLQ

SEQ ID NO: 11836 - protein, 44 aa, Homo Sapiens
MQTCPLAFPGHVSQALGTLLFLAASLSAQNEGWDSPICTEGVVS

SEQ ID NO: 11837 - protein, 85 aa, Homo Sapiens
MQTCPLAFPGHVSQALGTLLFLAASLSAQNEGWDSPICTEGVVSVSWGENTVMSCNISNAFSHVNIKLRAHGQESAIFNEVAPGY

SEQ ID NO: 11838 - protein, 147 aa, Homo Sapiens
MQTCPLAFPGHVSQALGTLLFLAASLSAQNEGWDSPICTEGVVSVSWGENTVMSCNISNAFSHVNIKLRAHGQESAIFNEVAPGYFSRDGWQLQVQGGVAQLVIKGARDSHAGLYMWHLVGHQRNNRQVTLEVSEPRGLKDRASAQL

SEQ ID NO: 11839 - protein, 170 aa, Homo Sapiens
MQTCPLAFPGHVSQALGTLLFLAASLSAQNEGWDSPICTEGVVSVSWGENTVMSCNISNAFSHVNIKLRAHGQESAIFNEVAPGYFSRDGWQLQVQGGVAQLVIKGARDSHAGLYMWHLVGHQRNNRQVTLEVSEPRGLKDRASAQLLGPGTSRGAEPQSAPDTGFWPVP

SEQ ID NO: 11840 - protein, 149 aa, Homo Sapiens
MQTCPLAFPGHVSQALGTLLFLAASLSAQNEGWDSPICTEGVVSVSWGENTVMSCNISNAFSHVNIKLRAHGQESAIFNEVAPGYFSRDGWQLQVQGGVAQLVIKGARDSHAGLYMWHLVGHQRNNRQVTLEVSGAAVPSNAGRRSSSS

SEQ ID NO: 11841 - protein, 178 aa, Homo Sapiens
MQTCPLAFPGHVSQALGTLLFLAASLSAQNEGWDSPICTEGVVSVSWGENTVMSCNISNAFSHVNIKLRAHGQESAIFNEVAPGYFSRDGWQLQVQGGVAQLVIKGARDSHAGLYMWHLVGHQRNNRQVTLEVSGAEPQSAPDTGFWPVPAVVTAVFILLVALVMFAWYRCRCSQQRR

SEQ ID NO: 11842 - protein, 248 aa, Homo Sapiens
MQTCPLAFPGHVSQALGTLLFLAASLSAQNEGWDSPICTEGVVSVSWGENTVMSCNISNAFSHVNIKLRAHGQESAIFNEVAPGYFSRDGWQLQVQGGVAQLVIKGARDSHAGLYMWHLVGHQRNNRQVTLEVSGAEPQSAPDTGFWPVPAVVTAVFILLVALVMFAWYRCRCSQQRREKKFFLLEPQMKVAALRAGAQQGLSRASAELWTPDSEPTPRPLALVFKPSPLGALELLSPQPLFPYAADP

SEQ ID NO: 11843 - protein, 794 aa, Homo Sapiens
MRVRIGLTLLLCAVLLSLASASSDEEGSQDESLDSKTTLTSDESVKDHTTAGRVVAGQIFLDSEESELESSIQEEEDSLKSQEGESVTEDISFLESPNPENKDYEEPKKVRKPALTAIEGTAHGEPCHFPFLFLDKEYDECTSDGREDGRLWCATTYDYKADEKWGFCETEEEAAKRRQMQEAEMMYQTGMKILNGSNKKSQKREAYRYLQKAASMNHTKALERVSYALLFGDYLPQNIQAAREMFEKLTEEGSPKGQTALGFLYASGLGVNSSQAKALVYYTFGALGGNLIAHMVLGYRYWAGIGVLQSCESALTHYRLVANHVASDISLTGGSVVQRIRLPDEVENPGMNSGMLEEDLIQYYQFLAEKGDVQAQVGLGQLHLHGGRGVEQNHQRAFDYFNLAANAGNSHAMAFLGKMYSEGSDIVPQSNETALHYFKKAADMGNPVGQSGLGMAYLYGRGVQVNYDLALKYFQKAAEQGWVDGQLQLGSMYYNGIGVKRDYKQALKYFNLASQGGHILAFYNLAQMHASGTGVMRSCHTAVELFKNVCERGRWSERLMTAYNSYKDGDYNAAVIQYLLLAEQGYEVAQSNAAFILDQREASIVGENETYPRALLHWNRAASQGYTVARIKLGDYHFYGFGTDVDYETAFIHYRLASEQQHSAQAMFNLGYMHEKGLGIKQDIHLAKRFYDMAAEASPDAQVPVFLALCKLGVVYFLQYIRETNIRDMFTQLDMDQLLGPEWDLYLMTIIALLLGTVIAYRQRQHQDMPAPRPPGPRPAPPQQEGPPEQQPPQ

SEQ ID NO: 11844 - protein, 301 aa, Homo Sapiens
MRVRIGLTLLLCAVLLSLASASSDEEGSQDESLDSKTTLTSDESVKDHTTAGRVVAGQIFLDSEESELESSIQEEEDSLKSQEGESVTEDISFLESPNPENKDYEEPKKVRKPALTAIEGTAHGEPCHFPFLFLDKEYDECTSDGREDGRLWCATTYDYKADEKWGFCETEEEAAKRRQMQEAEMMYQTGMKILNGSNKKSQKREAYRYLQKAASMNHTKALERVSYALLFGDYLPQNIQAAREMFEKLTEEGSPKGQTALGFLYASGLGVNSSQAKALVYYTFGALGGNLIAHMVLVSRL

SEQ ID NO: 11845 - protein, 163 aa, Homo Sapiens
MRVRIGLTLLLCAVLLSLASASSDEEGSQDESLDSKTTLTSDESVKDHTTAGRVVAGQIFLDSEESELESSIQEEEDSLKSQEGESVTEDISFLESPNPENKDYEEPKKVRKPDKEYDECTSDGREDGRLWCATTYDYKADEKWGFCETEEEAAKRRQMQEAE

SEQ ID NO: 11846 - protein, 88 aa, Homo Sapiens
FNLLQLDPDCRGCCQEEAQFETKKYSSIVSKQECHHSNCMQELFLKFVDENWEGSLKSKYVRGSDPVLKLLDDNGNIAEELSILKWNT

SEQ ID NO: 11847 - protein, 164 aa, Homo Sapiens
MVAMAAGPSGCLVPAFGLRLLLATVLQAVSAFGAEFSSEACRELGFSSNLLCSSCDLLGQFNLLQLDPDCRGCCQEEAQFETKKLYAGAILEVCGKLGRFPQVQAFVRSDKPKLFRGLQIKYVRGSDPVLKLLDDNGNIAEELSILKWNTDSVEEFLSEKLERI

SEQ ID NO: 11848 - protein, 123 aa, Homo Sapiens
MVAMAAGPSGCLVPAFGLRLLLATVLQAVSAFGAEFSSEACRELGFSSNLLCSSCDLLGQFNLLQLDPDCRGCCQEEAQFETKKLYAGAILEVCGKLGRFPQVQVCPWFRPCIKAFGRQWEHC

SEQ ID NO: 11849 - protein, 164 aa, Homo Sapiens; identical to SEQ ID NO: 11847

SEQ ID NO: 11850 - protein, 123 aa, Homo Sapiens; identical to SEQ ID NO: 11848

SEQ ID NO: 11851 - protein, 144 aa, Homo Sapiens
MVAMAAGPSGCLVPAFGLRLLLATVLQAVSAFGAEFSSEACRELGFSSNLLCSSCDLLGQFNLLQLDPDCRGCCQEEAQFETKKYSSIVSKQECHHSNCMQELFLKFVDENWEGSLKSKLLLGVINPNCSEDCKSSMSVVQTLY

SEQ ID NO: 11852 - protein, 31 aa, Homo Sapiens
  misc_feature (1)..(1): Xaa can be any naturally occurring amino acid
XGLRLLLATVLQAVSVDHLRSCHRESRSDCS

SEQ ID NO: 11853 - protein, 144 aa, Homo Sapiens
MSLLLPPLALLLLLAALVAPATAATAYRPDWNRLSGLTRARVETCGGQLNRLKEVKAFVTQDIPFYHNLVMKHLPGADPELVLLGRRYEELERIPLSEMTREEINALVQELGFYRKAAPDAQVPPEYVWAPAKPPEETSDHADL

SEQ ID NO: 11854 - protein, 144 aa, Homo Sapiens; identical to SEQ ID NO: 11853

SEQ ID NO: 11855 - protein, 144 aa, Homo Sapiens; identical to SEQ ID NO: 11853

SEQ ID NO: 11856 - protein, 588 aa, Homo Sapiens
MGRARPGQRGPPSPGPAAQPPAPPRRRARSLALLGALLAAAAAAAVRVCARHAEAQAAARQELALKTLGTDGLFLFSSLDTDGDMYISPEEFKPIAEKLTGSCSVTQTGVQWCSHSSLQPQLPWLNSSCLSLLRSTPAASCEEEELPPDPSEETLTIEARFQPLLPETMTKSKDGFLGVSRLALSGLRNWTAAASPSAVFATRHFQPFLPPPGQELGEPWWIIPSELSMFTGYLSNNRFYPPPPKGKEVIIHRLLSMFHPRPFVKTRFAPQGAVACLTAISDFYYTVMFRIHAEFQLSEPPDFPFWFSPAQFTGHIILSKDATHVRDFRLFVPNHRSLNVDMEWLYGASESSNMEVDIGYIPQMELEATGPSVPSVILDEDGSMIDSHLPSGEPLQFVFEEIKWQQELSWEEAARRLEVAMYPFKKVSYLPFTEAFDRAKAENKLVHSILLWGALDDQSCGSGRTLRETVLESSPILTLLNESFISTWSLVKELEELQNNQENSSHQKLAGLHLEKYSFPVEMMICLPNGTVVHHINANYFLDITSVKPEEIESNLFSFSSTFEDPSTATYMQFLKEGLRRGLPLLQP

SEQ ID NO: 11857 - protein, 555 aa, Homo Sapiens
MGRARPGQRGPPSPGPAAQPPAPPRRRARSLALLGALLAAAAAAAVRVCARHAEAQAAARQELALKTLGTDGLFLFSSLDTDGDMYISPEEFKPIAEKLTGSTPAASCEEEELPPDPSEETLTIEARFQPLLPETMTKSKDGFLGVSRLALSGLRNWTAAASPSAVFATRHFQPFLPPPGQELGEPWWIIPSELSMFTGYLSNNRFYPPPPKGKEVIIHRLLSMFHPRPFVKTRFAPQGAVACLTAISDFYYTVMFRIHAEFQLSEPPDFPFWFSPAQFTGHIILSKDATHVRDFRLFVPNHRSLNVDMEWLYGASESSNMEVDIGYIPQMELEATGPSVPSVILDEDGSMIDSHLPSGEPLQFVFEEIKWQQELSWEEAARRLEVAMYPFKKVSYLPFTEAFDRAKAENKLVHSILLWGALDDQSCGSGRTLRETVLESSPILTLLNESFISTWSLVKELEELQNNQENSSHQKLAGLHLEKYSFPVEMMICLPNGTVVHHINANYFLDITSVKPEEIESNLFSFSSTFEDPSTATYMQFLKEGLRRGLPLLQP

SEQ ID NO: 11858 - protein, 556 aa, Homo Sapiens
MGRARPGQRGPPSPGPAAQPPAPPRRRARSLALLGALLAAAAAAAVRVCARHAEAQAAARQELALKTLGTDGLFLFSSLDTDGDMYISPEEFKPIAEKLTGSTPAASCEEEELPPDPSEETLTIEARFQPLLPETMTKSKDGFLGVSRLALSGLRNWTAAASPSAVFATRHFQPFLPPPGQELGEPWWIIPSELSMFTGYLSNNRFYPPPPKGKEVIIHRLLSMFHPRPFVKTRFAPQGAVACLTAISDFYYTVMFRIHAEFQLSEPPDFPFWFSPAQFTGHIILSKDATHVRDFRLFVPNHRSLNVDMEWLYGASESSNMEVDIGYIPQMELEATGPSVPSVILDEDGSMIDSHLPSGEPLQFVFEEIKWQQELSWEEAARRLEVAMYPFKKVSYLPFTEAFDRAKAENKLVHSILLWGALDDQSCHCSGRTLRETVLESSPILTLLNESFISTWSLVKELEELQNNQENSSHQKLAGLHLEKYSFPVEMMICLPNGTVVHHINANYFLDITSVKPEEIESNLFSFSSTFEDPSTATYMQFLKEGLRRGLPLLQP

SEQ ID NO: 11859 - protein, 66 aa, Homo Sapiens
MMICLPNGTVVHHINANYFLDITSVKPEEIESNLFSFSSTFEDPSTATYMQFLKEGLRRGLPLLQP

SEQ ID NO: 11860 - protein, 668 aa, Homo Sapiens
MAVYRAALGASLAAARLLPLGRCSPSPAPRSTLSGAAMEPAPRWLAGLRFDNRALRALPVEAPPPGPEGAPSAPRPVPGACFTRVQPTPLRQPRLVALSEPALALLGLGAPPAREAEAEAALFFSGNALLPGAEPAAHCYCGHQFGQFAGQLGDGAAMYLGEVCTATGERWELQLKGAGPTPFSRQADGRKVLRSSIREFLCSEAMFHLGVPTTRAGACVTSESTVVRDVFYDGNPKYEQCTVVLRVASTFIRFGSFEIFKSADEHTGRAGPSVGRNDIRVQLLDYVISSFYPEIQAAHASDSVQRNAAFFREVTRRTARMVAEWQCVGFCHGVLNTDNMSILGLTIDYGPFGFLDRYDPDHVCNASDNTGRYAYSKQPEVCRWNLRKLAEALQPELPLELGEAILAEEFDAEFQRHYLQKMRRKLGLVQVELEEDGALVSKLLETMHLTGADFTNTFYLLSSFPVELESPGLAEFLARLMEQCASLEELRLAFRPQMDPRQLSMMLMLAQSNPQLFALMGTRAGIARELERVEQQSRLEQLSAAELQSRNQGHWADWLQAYRARLDKDLEGAGDAAAWQAEHVRVMHANNPKYVLRNYIAQNAIEAAERGDFSEVRRVLKLLETPYHCEAGAATDAEATEADGADGRQRSYSSKPPLWAAELCVTSS

SEQ ID NO: 11861 - protein, 668 aa, Homo Sapiens; identical to SEQ ID NO: 11860

SEQ ID NO: 11862 - protein, 208 aa, Homo Sapiens
MWRSLGLALALCLLPSGGTESQDQSSLCKQPPAWSIRDQDPMLNSNGSVTVVALLQASYLCILQASKLEDLRVKLKKEGYSNISYIVVNHQGISSRLKYTHLKNKVSEHIPVYQQEENQTDVWTLLNGSKDDFLIYDRCGRLVYHLGLPFSFLTFPYVEEAIKIAYCEKKCGNCSLTTLKDEDFCKRVSLATVDKTVETPSPHYHHEH

SEQ ID NO: 11863 - protein, 371 aa, Homo Sapiens
MWRSLGLALALCLLPSGGTESQDQSSLCKQPPAWSIRDQDPMLNSNGSVTVVALLQASYLCILQASKLEDLRVKLKKEGYSNISYIVVNHQGISSRLKYTHLKNKVSEHIPVYQQEENQTDVWTLLNGSKDDFLIYDRCGRLVYHLGLPFSFLTFPYVEEAIKIAYCEKKCGNCSLTTLKDEDFCKRVSLATVDKTVETPSPHYHHEHHHNHGHQHLGSSELSENQQPGAPNAPTHPAPPGLHHHHKHKGQHRQGHPENRDMPASEDLQDLQKKLCRKRCINQLLCKLPTDSELAPRSCCHCRHLIFEKTGSAITQCKENLPSLCSQGLRAEENITESCQRLPPAAQISQQLIPTEASASRKNQAKKEPSN

SEQ ID NO: 11864 - protein, 371 aa, Homo Sapiens; identical to SEQ ID NO: 11863

SEQ ID NO: 11865 - protein, 371 aa, Homo Sapiens; identical to SEQ ID NO: 11863

SEQ ID NO: 11866 - protein, 308 aa, Homo Sapiens
MWRSLGLALALCLLPSGGTESQDQSSLCKQPPAWSIRDQDPMLNSNGSVTVVALLQASYLCILQASKLEDLRVKLKKEGYSNISYIVVNHQGISSRLKYTHLKNKVSEHIPVYQQEENQTDVWTLLNGSKDDFLIYDRCGRLVYHLGLPFSFLTFPYVEEAIKIAYCEKKCGNCSLTTLKDEDFCKRVSLATVDKTVETPSPHYHHEHHHNHGHQHLGSSELSENQQPGAPNAPTHPAPPGLHHHHKHKGQHRQGHPENRDMPASEDLQDLQKKLCRKRCINQLLCKLPTDSELAPRSCCHCRHLIFE

SEQ ID NO: 11867 - protein, 170 aa, Homo Sapiens
MWRSLGLALALCLLPSGGTESQDQSSLCKQPPAWSIRDQDPMLNSNGSVTVVALLQASYLCILQASKLSKMKTFVNVYLWLLWIKQLKLHRLITIMSIITIMDISTLAAVSFQRISNQEHQMLLLILLLQAFITTISTRVSIGRVTQRTEICQQVKIYKIYKRSSVERDV

SEQ ID NO: 11868 - protein, 19 aa, Homo Sapiens
MGWLTRIVCLFWGVLLTAR

SEQ ID NO: 11869 - protein, 37 aa, Homo Sapiens
MGWLTRIVCLFWGVLLTARANYQNGKNNVPRLKLSYK

SEQ ID NO: 11870 - protein, 149 aa, Homo Sapiens
MGWLTRIVCLFWGVLLTARANYQNGKNNVPRLKLSYKEMLESNNVITFNGLANSSSYHTFLLDEERSRLYVGAKDHIFSFDLVNIKDFQKIVWPVSYTRRDECKWAGKDILKECANFIKVLKAYNQTHLYACGTGAFHPICTYIEIGHH

SEQ ID NO: 11871 - protein, 771 aa, Homo Sapiens [sequence omitted]

SEQ ID NO: 11872 - protein, 771 aa, Homo Sapiens [sequence omitted]

SEQ ID NO: 11873 - protein, 214 aa, Homo Sapiens
MGRAGAAAVIPGLALLWAVGLGSAAPSPPRLRLSFQELQAWHGLQTFSLERTCCYQALLVDEERGRLFVGAENHVASLNLDNISKRAKKLAWPAPVEWREECNWAGKDIGTECMNFVKLLHAYNRTHLLACGTGAFHPTCAFVEVGHRAEEPVLRLDPGRIEDGKGKSPYDPRHRAASVLVGEELYSGVAADLMGRDFTIFRSLGQRPSLRTEP

SEQ ID NO: 11874 - protein, 748 aa, Homo Sapiens
MGRAGAAAVIPGLALLWAVGLGSAAPSPPRLRLSFQELQAWHGLQTFSLERTCCYQALLVDEERGRLFVGAENHVASLNLDNISKRAKKLAWPAPVEWREECNWAGKDIGTECMNFVKLLHAYNRTHLLACGTGAFHPTCAFVEVGHRAEEPVLRLDPGRIEDGKGKSPYDPRHRAASVLVGEELYSGVAADLMGRDFTIFRSLGQRPSLRTEPHDSRWLNEPKFVKVFWIPESENPDDDKIYFFFRETAVEAAPALGRLSVSRVGQICRNDVGGQRSLVNKWTTFLKARLVCSVPGVEGDTHFDQLQDVFLLSSRDHRTPLLYAVFSTSSIFQGSAVCVYSMNDVRRAFLGPFAHKEGPMHQWVSYQGRVPYPRPGMCPSKTFGTFSSTKDFPDDVIQFARNHPLMYNSVLPTGGRPLFLQVGANYTFTQIAADRVAAADGHYDVLFIGTDVGTVLKVISVPKGSRPSAEGLLLEELHVFEDSAAVTSMQISSKRHQLYVASRSAVAQIALHRCAAHGRVCTECCLARDPYCAWDGVACTRFQPSAKRRFRRQDVRNGDPSTLCSGDSSRPALLEHKVFGVEGSSAFLECEPRSLQARVEWTFQRAGVTAHTQVLAEERTERTARGLLLRRLRRRDSGVYLCAAVEQGFTQPLRRLSLHVLSATQAERLARAEEAAPAAPPGPKLWYRDFLQLVEPGGGGSANSLRMCRPQPALQSLPLESRRKGRNRRTHAPEPRAERGPRSATHW

SEQ ID NO: 11875 - protein, 754 aa, Homo Sapiens
MGRAGAAAVIPGLALLWAVGLGSAAPSPPRLRLSFQELQAWHGLQTFSLERTCCYQALLVDEERGRLFVGAENHVASLNLDNISKRAKKLAWPAPVEWREECNWAGKDIGTECMNFVKLLHAYNRTHLLACGTGAFHPTCAFVEVGHRAEEPVLRLDPGRIEDGKGKSPYDPRHRAASVLVGEELYSGVAADLMGRDFTIFRSLGQRPSLRTEPHDSRWLNEPKFVKVFWIPESENPDDDKIYFFFRETAVEAAPALGRLSVSRVGQICRNDVGGQRSLVNKWTTFLKARLVCSVPGVEGDTHFDQLRPFPAEDVFLLSSRDHRTPLLYAVFSTSSSIFQGSAVCVYSMNDVRRAFLGPFAHKEGPMHQWVSYQGRVPYPRPGMCPSKTFGTFSSTKDFPDDVIQFARNHPLMYNSVLPTGGRPLFLQVGANYTFTQIAADRVAAADGHYDVLFIGTDVGTVLKVISVPKGSRPSAEGLLLEELHVFEDSAAVTSMQISSKRHQLYVASRSAVAQIALHRCAAHGRVCTECCLARDPYCAWDGVACTRFQPSAKRRFRRQDVRNGDPSTLCSGDSSRPALLEHKVFGVEGSSAFLECEPRSLQARVEWTFQRAGVTAHTQVLAEERTERTARGLLLRRLRRRDSGVYLCAAVEQGFTQPLRRLSLHVLSATQAERLARAEEAAPAAPPGPKLWYRDFLQLVEPGGGGSANSLRMCRPQPALQSLPLESRRKGRNRRTHAPEPRAERGPRSATHW

SEQ ID NO: 11876 - protein, 749 aa, Homo Sapiens
MGRAGAAAVIPGLALLWAVGLGSAAPSPPRLRLSFQELQAWHGLQTFSLERTCCYQALLVDEERGRLFVGAENHVASLNLDNISKRAKKLAWPAPVEWREECNWAGKDIGTECMNFVKLLHAYNRTHLLACGTGAFHPTCAFVEVGHRAEEPVLRLDPGRIEDGKGKSPYDPRHRAASVLVGEELYSGVAADLMGRDFTIFRSLGQRPSLRTEPHDSRWLNEPKFVKVFWIPESENPDDDKIYFFFRETAVEAAPALGRLSVSRVGQICRNDVGGQRSLVNKWTTFLKARLVCSVPGVEGDTHFDQLQDVFLLSSRDHRTPLLYAVFSTSSSIFQGSAVCVYSMNDVRRAFLGPFAHKEGPMHQWVSYQGRVPYPRPGMCPSKTFGTFSSTKDFPDDVIQFARNHPLMYNSVLPTGGRPLFLQVGANYTFTQIAADRVAAADGHYDVLFIGTDVGTVLKVISVPKGSRPSAEGLLLEELHVFEDSAAVTSMQISSKRHQLYVASRSAVAQIALHRCAAHGRVCTECCLARDPYCAWDGVACTRFQPSAKRRFRRQDVRNGDPSTLCSGDSSRPALLEHKVFGVEGSSAFLECEPRSLQARVEWTFQRAGVTAHTQVLAEERTERTARGLLLRRLRRRDSGVYLCAAVEQGFTQPLRRLSLHVLSATQAERLARAEEAAPAAPPGPKLWYRDFLQLVEPGGGGSANSLRMCRPQPALQSLPLESRRKGRNRRTHAPEPRAERGPRSATHW

SEQ ID NO: 11877 - protein, 749 aa, Homo Sapiens; identical to SEQ ID NO: 11876

SEQ ID NO: 11878 - protein, 406 aa, Homo Sapiens
MNDVRRAFLGPFAHKEGPMHQWVSYQGRVPYPRPGMCPSKTFGTFSSTKDFPDDVIQFARNHPLMYNSVLPTGGRPLFLQVGANYTFTQIAADRVAAADGHYDVLFIGTDVGTVLKVISVPKGSRPSAEGLLLEELHVFEDSAAVTSMQISSKRHQLYVASRSAVAQIALHRCAAHGRVCTECCLARDPYCAWDGVACTRFQPSAKRRFRRQDVRNGDPSTLCSGDSSRPALLEHKVFGVEGSSAFLECEPRSLQARVEWTFQRAGVTAHTQVLAEERTERTARGLLLRRLRRRDSGVYLCAAVEQGFTQPLRRLSLHVLSATQAERLARAEEAAPAAPPGPKLWYRDFLQLVEPGGGGSANSLRMCRPQPALQSLPLESRRKGRNRRTHAPEPRAERGPRSATHW

SEQ ID NO: 11879 - protein, 406 aa, Homo Sapiens; identical to SEQ ID NO: 11878

SEQ ID NO: 11880 - protein, 751 aa, Homo Sapiens
MAFRTICVLVGVFICSICVKGSSQPQARVYLTFDELRETKTSEYFSLSHHPLDYRILLMDEDQDRIYVGSKDHILSLNINNISQEALSVFWPASTIKVEECKMAGKDPTHGCGNFVRVIQTFNRTHLYVCGSGAFSPVCTYLNRGRRSEDQVFMIDSKCESGKGRCSFNPNVNTVSVMINEELFSGMYIDFMGTDAAIFRSLTKRNAVRTDQHNSKWLSEPMFVDAHVIPDGTDPNDAKVYFFFKEKLTDNNRSTKQIHSMIARICPNDTGGLRSLVNKWTTFLKARLVCSVTDEDGPETHFDELEDVFLLETDNPRTTLVYGIFTTSSSVFKGSAVCVYHLSDIQTVFNGPFAHKEGPNHQLISYQGRIPYPRPGTCPGGAFTPNMRTTKEFPDDVVTFIRNHPLMYNSIYPIHKRPLIVRIGTDYKYTKIAVDRVNAADGRYHVLFLGTDRGTVQKVVVLPTNNSVSGELILEELEVFKNHAPITTMKISSKKQQLYVSSNEGVSQVSLHRCHIYGTACADCCLARDPYCAWDGHSCSRFYPTGKRRSRRQDVRHGNPLTQCRGFNLKAYRNAAEIVQYGVKNNTTFLECAPKSPQASIKWLLQKDKDRRKEVKLNERIIATSQGLLIRSVQGSDQGLYHCIATENSFKQTIAKINFKVLDSEMVAVVTDKWSPWTWASSVRALPFHPKDIMGAFSHSEMQMINQYCKDTRQQHQQGDESQKMRGDYGKLKALINSRKSRNRRNQLPES

SEQ ID NO: 11881 - protein, 751 aa, Homo Sapiens; identical to SEQ ID NO: 11880

SEQ ID NO: 11882 - protein, 63 aa, Homo Sapiens
MAFRTICVLVGVFICSICVKGSSQPQARVYLTFDEPTLYNAVCYICGYKKKCGVNLVLSNHLL

SEQ ID NO: 11883 - protein, 63 aa, Homo Sapiens; identical to SEQ ID NO: 11882

SEQ ID NO: 11884 - protein, 40 aa, Homo Sapiens
MAFRTICVLVGVFICSICVKGSSQPQARVYLTFDGPSFHD

SEQ ID NO: 11885 - protein, 39 aa, Homo Sapiens
MASAGHIITLLLWGYLLELWTGGHTADTTHPRLRLSHKE

SEQ ID NO: 11886 - protein, 775 aa, Homo Sapiens
MASAGHIITLLLWGYLLELWTGGHTADTTHPRLRLSHKELLNLNRTSIFHSPFGFLDLHTMLLDEYQERLFVGGRDLVYSLSLERISDGYKEIHWPSTALKMEECIMKGKDAGECANYVRVLHHYNRTHLLTCGTGAFDPVCAFIRVGYHLEDPLFHLESPRSERGRGRCPFDPSSSFISTLIGSELFAGLYSDYWSRDAAIFRSMGRLAHIRTEHDDERLLKEPKFVGSYMIPDNEDRDDNKVYFFFTEKALEAENNAHAIYTRVGRLCVNDVGGQRILVNKWSTFLKARLVCSVPGMNGIDTYFDELEDVFLLPTRDHKNPVIFGLFNTTSNIFRGHAICVYHMSSIRAAFNGPYAHKEGPEYHWSVYEGKVPYPRPGSCASKVNGGRYGTTKDYPDDAIRFARSHPLMYQAIKPAHKKPILVKTDGKYNLKQIAVDRVEAEDGQYDVLFIGTDNGIVLKVITIYNQEMESMEEVILEELQIFKDPVPIISMEISSKRQQLYIGSASAVAQVRFHHCDMYGSACADCCLARDPYCAWDGISCSRYYPTGTHAKRRFRRQDVRHGNAAQQCFGQQFVGDALDKTEEHLAYGIENNSTLLECTPRSLQAKVIWFVQKGRETRKEEVKTDDRVVKMDLGLLFLRLHKSDAGTYFCQTVEHSFVHTVRKITLEVVEEEKVEDMFNKDDEEDRHHRMPCPAQSSISQGAKPWYKEFLQLIGYSNFQRVEEYCEKVWCTDRKRKKLKMSPSKWKYANPQEKKLRSKPEHYRLPRHTLDS

SEQ ID NO: 11887 - protein, 630 aa, Homo Sapiens
MASAGHIITLLLWGYLLELWTGGHTADTTHPRLRLSHKELLNLNRTSIFHSPFGFLDLHTMLLDEYQERLFVGGRDLVYSLSLERISDGYKEIHWPSTALKMEECIMKGKDAGECANYVRVLHHYNRTHLLTCGTGAFDPVCAFIRVGYHLEDPLFHLESPRSERGRGRCPFDPSSSFISTLIGSELFAGLYSDYWSRDAAIFRSMGRLAHIRTEHDDERLLKEPKFVGSYMIPDNEDRDDNKVYFFFTEKALEAENNAHAIYTRVGRLCVNDVGGQRILVNKWSTFLKARLVCSVPGMNGIDTYFDELEDVFLLPTRDHKNPVIFGLFNTTSNIFRGHAICVYHMSSIRAAFNGPYAHKEGPEYHWSVYEGKVPYPRPGSCASKVNGGRYGTTKDYPDDAIRFARSHPLMYQAIKPAHKKPILVKTDGKYNLKQIAVDRVEAEDGQYDVLFIGTDNGIVLKVITIYNQEMESMEEVILEELQIFKDPVPIISMEISSKRQQLYIGSASAVAQVRFHHCDMYGSACADCCLARDPYCAWDGISCSRYYPTGTHAKRRFRRQDVRHGNAAQQCFGQQFVGDALDKTEEHLAYGIENNSTLLECTPRSLQAKVIWFVQKGRETRKEEVKAMS

SEQ ID NO: 11888 - protein, 775 aa, Homo Sapiens; identical to SEQ ID NO: 11886

SEQ ID NO: 11889 - protein, 715 aa, Homo Sapiens
MLLDEYQERLFVGGRDLVYSLSLERISDGYKEIHWPSTALKMEECIMKGKDAGECANYVRVLHHYNRTHLLTCGTGAFDPVCAFIRVGYHLEDPLFHLESPRSERGRGRCPFDPSSSFISTLIGSELFAGLYSDYWSRDAAIFRSMGRLAHIRTEHDDERLLKEPKFVGSYMIPDNEDRDDNKVYFFFTEKALEAENNAHAIYTRVGRLCVNDVGGQRILVNKWSTFLKARLVCSVPGMNGIDTYFDELEDVFLLPTRDHKNPVIFGLFNTTSNIFRGHAICVYHMSSIRAAFNGPYAHKEGPEYHWSVYEGKVPYPRPGSCASKVNGGRYGTTKDYPDDAIRFARSHPLMYQAIKPAHKKPILVKTDGKYNLKQIAVDRVEAEDGQYDVLFIGTDNGIVLKVITIYNQEMESMEEVILEELQIFKDPVPIISMEISSKRQQLYIGSASAVAQVRFHHCDMYGSACADCCLARDPYCAWDGISCSRYYPTGTHAKRRFRRQDVRHGNAAQQCFGQQFVGDALDKTEEHLAYGIENNSTLLECTPRSLQAKVIWFVQKGRETRKEEVKTDDRVVKMDLGLLFLRLHKSDAGTYFCQTVEHSFVHTVRKITLEVVEEEKVEDMFNKDDEEDRHHRMPCPAQSSISQGAKPWYKEFLQLIGYSNFQRVEEYCEKVWCTDRKRKKLKMSPSKWKYANPQEKKLRSKPEHYRLPRHTLDS

SEQ ID NO: 11890 - protein, 147 aa, Homo Sapiens
GTAHFFNFLLNTTDYRILLKDEDHDRMYVGSKDYVLSLDLHDINREPLIIHWAASPQRIEECVLSGKDVNPSLWPQGECGNFVRLIQPWNRTHLYVCGTGAYNPMCTYVNRGRRAQDYIFYLEPERLESGKGKCPYDPKLDTASALI

SEQ ID NO: 11891 - protein, 785 aa, Homo Sapiens
MLVAGLLLWASLLTGAWPSFPTQDHLPATPRVRLSFKELKATGTAHFFNFLLNTTDYRILLKDEDHDRMYVGSKDYVLSLDLHDINREPLIIHWAASPQRIEECVLSGKDVNGECGNFVRLIQPWNRTHLYVCGTGAYNPMCTYVNRGRRAQATPWTQTQAVRGRGSRATDGALRPMPTAPRQDYIFYLEPERLESGKGKCPYDPKLDTASALINEELYAGVYIDFMGTDAAIFRTLGKQTAMRTDQYNSRWLNDPSFIHAELIPDSAERNDDKLYFFFRERSAEAPQSPAVYARIGRICLNDDGGHCCLVNKWSTFLKARLVCSVPGEDGIETHFDELQDVFVQQTQDVRNPVIYAVFTSSGSVFRGSAVCVYSMADIRMVFNGPFAHKEGPNYQWMPFSGKMPYPRPGTCPGGTFTPSMKSTKDYPDEVINFMRSHPLMYQAVYPLQRRPLVVRTGAPYRLTTIAVDQVDAADGRYEVLFLGTDRGTVQKVIVLPKDDQELEELMLEEVEVFKDPAPVKTMTISSKRQQLYVASAVGVTHLSLHRCQAYGAACADCCLARDPYCAWDGQACSRYTASSKRRSRRQDVRHGNPIRQCRGFNSNANKNAVESVQYGVAGSAAFLECQPRSPQATVKWLFQRDPGDRRREIRAEDRFLRTEQGLLLRALQLSDRGLYSCTATENNFKHVVTRVQLHVLGRDAVHAALFPPLSMSAPPPPGAGPPTPPYQELAQLLAQPEVGLIHQYCQGYWRHVPPSPREAPGAPRSPEPQDQKKPRNRRHHPPDT

SEQ ID NO: 11892 - protein, 264 aa, Homo Sapiens
MLVAGLLLWASLLTGAWPSFPTQDHLPATPRVRLSFKELKATGTAHFFNFLLNTTDYRILLKDEDHDRMYVGSKDYVLSLDLHDINREPLIIHWAASPQRIEECVLSGKDVNGECGNFVRLIQPWNRTHLYVCGTGAYNPMCTYVNRGRRAQDYIFYLEPERLESGKGKCPYDPKLDTASALINEELYAGVYIDFMGTDAAIFRTLGKQTAMRTDQYNSRWLNDPSFIHAELIPDSAERNDDKLYFFFRERSAEAPQSPAVYAR

SEQ ID NO: 11893 - protein, 754 aa, Homo Sapiens
MLVAGLLLWASLLTGAWPSFPTQDHLPATPRVRLSFKELKATGTAHFFNFLLNTTDYRILLKDEDHDRMYVGSKDYVLSLDLHDINREPLIIHWAASPQRIEECVLSGKDVNGECGNFVRLIQPWNRTHLYVCGTGAYNPMCTYVNRGRRAQDYIFYLEPERLESGKGKCPYDPKLDTASALINEELYAGVYIDFMGTDAAIFRTLGKQTAMRTDQYNSRWLNDPSFIHAELIPDSAERNDDKLYFFFRERSAEAPQSPAVYARIGRICLNDDGGHCCLVNKWSTFLKARLVCSVPGEDGIETHFDELQDVFVQQTQDVRNPVIYAVFTSSGSVFRGSAVCVYSMADIRMVFNGPFAHKEGPNYQWMPFSGKMPYPRPGTCPGGTFTPSMKSTKDYPDEVINFMRSHPLMYQAVYPLQRRPLVVRTGAPYRLTTIAVDQVDAADGRYEVLFLGTDRGTVQKVIVLPKDDQELEELMLEEVEVFKDPAPVKTMTISSKRQQLYVASAVGVTHLSLHRCQAYGAACADCCLARDPYCAWDGQACSRYTASSKRRSRRQDVRHGNPIRQCRGFNSNANKNAVESVQYGVAGSAAFLECQPRSPQATVKWLFQRDPGDRRREIRAEDRFLRTEQGLLLRALQLSDRGLYSCTATENNFKHVVTRVQLHVLGRDAVHAALFPPLSMSAPPPPGAGPPTPPYQELAQLLAQPEVGLIHQYCQGYWRHVPPSPREAPGAPRSPEPQDQKKPRNRRHHPPDT

SEQ ID NO: 11894 - protein, 380 aa, Homo Sapiens
MLVAGLLLWASLLTGAWPSFPTQDHLPATPRVRLSFKELKATGTAHFFNFLLNTTDYRILLKDEDHDRMYVGSKDYVLSLDLHDINREPLIIHWAASPQRIEECVLSGKDVNGECGNFVRLIQPWNRTHLYVCGTGAYNPMCTYVNRGRRAQDYIFYLEPERLESGKGKCPYDPKLDTASALINEELYAGVYIDFMGTDAAIFRTLGKQTAMRTDQYNSRWLNDPSFIHAELIPDSAERNDDKLYFFFRERSAEAPQSPAVYARIGRICLNDDGGHCCLVNKWSTFLKARLVCSVPGEDGIETHFDELQDVFVQQTQDVRNPVIYAVFTSSGSVFRGSAVCVYSMADIRMVFNGPFAHKEGPNYQWMPFSGKMPYPRPGT

SEQ ID NO: 11895 - protein, 92 aa, Homo Sapiens
MLVAGLLLWASLLTGAWPSFPTQDHLPATPRVRLSFKELKATGTAHFFNFLLNTTDYRILLKDEDHDRMYVGSKDYVLSLDLHDINREPLIV

SEQ ID NO: 11896 - protein, 686 aa, Homo Sapiens
MYVGSKDYVLSLDLHDINREPLIIHWAASPQRIEECVLSGKDVNGECGNFVRLIQPWNRTHLYVCGTGAYNPMCTYVNRGRRAQDYIFYLEPERLESGKGKCPYDPKLDTASALINEELYAGVYIDFMGTDAAIFRTLGKQTAMRTDQYNSRWLNDPSFIHAELIPDSAERNDDKLYFFFRERSAEAPQSPAVYARIGRICLNDDGGHCCLVNKWSTFLKARLVCSVPGEDGIETHFDELQDVFVQQTQDVRNPVIYAVFTSSGSVFRGSAVCVYSMADIRMVFNGPFAHKEGPNYQWMPFSGKMPYPRPGTCPGGTFTPSMKSTKDYPDEVINFMRSHPLMYQAVYPLQRRPLVVRTGAPYRLTTIAVDQVDAADGRYEVLFLGTDRGTVQKVIVLPKDDQELEELMLEEVEVFKDPAPVKTMTISSKRQQLYVASAVGVTHLSLHRCQAYGAACADCCLARDPYCAWDGQACSRYTASSKRRSRRQDVRHGNPIRQCRGFNSNANKNAVESVQYGVAGSAAFLECQPRSPQATVKWLFQRDPGDRRREIRAEDRFLRTEQGLLLRALQLSDRGLYSCTATENNFKHVVTRVQLHVLGRDAVHAALFPPLSMSAPPPPGAGPPTPPYQELAQLLAQPEVGLIHQYCQGYWRHVPPSPREAPGAPRSPEPQDQKKPRNRRHHPPDT

SEQ ID NO: 11897 - protein, 782 aa, Homo Sapiens
MAPSAWAICWLLGGLLLHGGSSGPSPGPSVPRLRLSYRDLLSANRSAIFLGPQGSLNLQAMYLDEYRDRLFLGGLDALYSLRLDQAWPDPREVLWPPQPGQREECVRKGRDPLTECANFVRVLQPHNRTHLLACGTGAFQPTCALITVGHRGEHVLHLEPGSVESGRGRCPHEPSRPFASTFIDGELYTGLTADFLGREAMIFRSGGPRPALRSDSDQSLLHDPRFVMAARIPENSDQDNDKVYFFFSETVPSPDGGSNHVTVSRVGRVCVNDAGGQRVLVNKWSTFLKARLVCSVPGPGGAETHFDQLEDVFLLWPKAGKSLEVYALFSTVSAVFQGFAVCVYHMADIWEVFNGPFAHRDGPQHQWGPYGGKVPFPRPGVCPSKMTAQPGRPFGSTKDYPDEVLQFARAHPLMFWPVRPRHGRPVLVKTHLAQQLHQIVVDRVEAEDGTYDVIFLGTDSGSVLKVIALQAGGSAEPEEVVLEELQVFKVPTPITEMEISVKRQMLYVGSRLGVAQLRLHQCETYGTACAECCLARDPYCAWDGASCTHYRPSLGKRRFRRQDIRHGNPALQCLGQSQEEEAVGLVAATMVYGTEHNSTFLECLPKSPQAAVRWLLQRPGDEGPDQVKTDERVLHTERGLLFRRLSRFDAGTYTCTTLEHGFSQTVVRLALVVIVASQLDNLFPPEPKPEEPPARGGLASTPPKAWYKDILQLIGFANLPRVDEYCERVWCRGTTECSGCFRSRSRGKQARGKSWAGLELGKKMKSRVHAEHNRTPREVEAT

SEQ ID NO: 11898 - protein, 186 aa, Homo Sapiens
MAPSAWAICWLLGGLLLHGGSSGPSPGPSVPRLRLSYRGAMVRKPSSTMWMETFSRYLLSANRSAIFLGPQGSLNLQAMYLDEYRDRLFLGGLDALYSLRLDQAWPDPREVLWPPQPGQREECVRKGRDPLTECANFVRVLQPHNRTHLLACGTGAFQPTCALITVGHRGEHVLHLEPGSVESGRG

SEQ ID NO: 11899 - protein, 99 aa, Homo Sapiens
  misc_feature (1)..(1): Xaa can be any naturally occurring amino acid
XSSGPSPGPSVPRLRLSYRDRVRQLRAGATASQPDPPASLWHWGLPAHLCPHHSWPPWGACAPPGAWQCGKWPGAVPSRAQPSLCQHLHRRGAVHGSHC

SEQ ID NO: 11900 - protein, 100 aa, Homo Sapiens
MALPALGLDPWSLLGLFLFQLLQLLLPTTTAGGGGQGPMPRVRYYAGDERRALSFFHQKGLQDFDTLLLSGDGNTLYVGAREAILALDIQDPGVPRLKNM

SEQ ID NO: 11901 - protein, 236 aa, Homo Sapiens
MALPALGLDPWSLLGLFLFQLLQLLLPTTTAGGGGQGPMPRVRYYAGDERRALSFFHQKGLQDFDTLLLSGDGNTLYVGAREAILALDIQDPGVPRLKNMIPWPASDRKKSECAFKKKSNEELQDSYLLPISEDKVMEGKGQSPFDPAHKHTAVLVDGMLYSGTMNNFLGSEPILMRTLGSQPVLKTDNFLRWLHHDASFVAAIPSTQVVYFFFEETASEFDFFERLHTSRVARVC

SEQ ID NO: 11902 - protein, 761 aa, Homo Sapiens
MALPALGLDPWSLLGLFLFQLLQLLLPTTTAGGGGQGPMPRVRYYAGDERRALSFFHQKGLQDFDTLLLSGDGNTLYVGAREAILALDIQDPGVPRLKNMIPWPASDRKKSECAFKKKSNETQCFNFIRVLVSYNVTHLYTCGTFAFSPACTFIELQDSYLLPISEDKVMEGKGQSPFDPAHKHTAVLVDGMLYSGTMNNFLGSEPILMRTLGSQPVLKTDNFLRWLHHDASFVAAIPSTQVVYFFFEETASEFDFFERLHTSRVARVCKNDVGGEKLLQKKWTTFLKAQLLCTQPGQLPFNVIRHAVLLPADSPTAPHIYAVFTSQWQVGGTRSSAVCAFSLLDIERVFKGKYKELNKETSRWTTYRGPETNPRPGSCSVGPSSDKALTFMKDHFLMDEQVVGTPLLVKSGVEYTRLAVETAQGLDGHSHLVMYLGTTTGSLHKAVVSGDSSAHLVEEIQLFPDPEPVRNLQLAPTQGAVFVGFSGGVWRVPRANCSVYESCVDCVLARDPHCAWDPESRTCCLLSAPNLNSWKQDMERGNPEWACASGPMSRSLRPQSRPQIIKEVLAVPNSILELPCPHLSALASYYWSHGPAAVPEASSTVYNGSLLLIVQDGVGGLYQCWATENGFSYPVISYWVDSQDQTLALDPELAGIPREHVKVPLTRVSGGAALAAQQSYWPHFVTVTVLFALVLSGALIILVASPLRALRARGKVQGCETLRPGEKAPLSREQHLQSPKECRTSASDVDADNNCLGTEVA

SEQ ID NO: 11903 - protein, 761 aa, Homo Sapiens; identical to SEQ ID NO: 11902

SEQ ID NO: 11904 - protein, 761 aa, Homo Sapiens; identical to SEQ ID NO: 11902

SEQ ID NO: 11905 - protein, 321 aa, Homo Sapiens
MALPALGLDPWSLLGLFLFQLLQLLLPTTTAGGGGQGPMPRVRYYAGDERRALSFFHQKGLQDFDTLLLSGDGNTLYVGAREAILALDIQDPGVPRLKNMIPWPASDRKKSECAFKKKSNETQCFNFIRVLVSYNVTHLYTCGTFAFSPACTFIELQDSYLLPISEDKVMEGKGQSPFDPAHKHTAVLVDGMLYSGTMNNFLGSEPILMRTLGSQPVLKTDNFLRWLHHDASFVAAIPSTQVVYFFFEETASEFDFFERLHTSRVARVCKNDVGGEKLLQKKWTTFLKAQLLCTQPGQLPFNVIRHAVLLPADSPTAPHIY

SEQ ID NO: 11906 - protein, 629 aa, Homo Sapiens
MIPWPASDRKKSECAFKKKSNEELQDSYLLPISEDKVMEGKGQSPFDPAHKHTAVLVDGMLYSGTMNNFLGSEPILMRTLGSQPVLKTDNFLRWLHHDASFVAAIPSTQVVYFFFEETASEFDFFERLHTSRVARVCKNDVGGEKLLQKKWTTFLKAQLLCTQPGQLPFNVIRHAVLLPADSPTAPHIYAVFTSQWQVGGTRSSAVCAFSLLDIERVFKGKYKELNKETSRWTTYRGPETNPRPGSCSVGPSSDKALTFMKDHFLMDEQVVGTPLLVKSGVEYTRLAVETAQGLDGHSHLVMYLGTTTGSLHKAVVSGDSSAHLVEEIQLFPDPEPVRNLQLAPTQGAVFVGFSGGVWRVPRANCSVYESCVDCVLARDPHCAWDPESRTCCLLSAPNLNSWKQDMERGNPEWACASGPMSRSLRPQSRPQIIKEVLAVPNSILELPCPHLSALASYYWSHGPAAVPEASSTVYNGSLLLIVQDGVGGLYQCWATENGFSYPVISYWVDSQDQTLALDPELAGIPREHVKVPLTRVSGGAALAAQQSYWPHFVTVTVLFALVLSGALIILVASPLRALRARGKVQGCETLRPGEKAPLSREQHLQSPKECRTSASDVDADNNCLGTEVA

SEQ ID NO: 11907 - protein, 220 aa, Homo Sapiens
MIPWPASDRKKSECAFKKKSNETQCFNFIRVLVSYNVTHLYTCGTFAFSPACTFIELQDSYLLPISEDKVMEGKGQSPFDPAHKHTAVLVDGMLYSGTMNNFLGSEPILMRTLGSQPVLKTDNFLRWLHHDASFVAAIPSTQVVYFFFEETASEFDFFERLHTSRVARVCKNDVGGEKLLQKKWTTFLKAQLLCTQPGQLPFNVIRHAVLLPADSPTAPH

SEQ ID NO: 11908 - protein, 723 aa, Homo Sapiens
MPRVRYYAGDERRALSFFHQKGLQDFDTLLLSGDGNTLYVGAREAILALDIQDPGVPRLKNMIPWPASDRKKSECAFKKKSNETQCFNFIRVLVSYNVTHLYTCGTFAFSPACTFIELQDSYLLPISEDKVMEGKGQSPFDPAHKHTAVLVDGMLYSGTMNNFLGSEPILMRTLGSQPVLKTDNFLRWLHHDASFVAAIPSTQVVYFFFEETASEFDFFERLHTSRVARVCKNDVGGEKLLQKKWTTFLKAQLLCTQPGQLPFNVIRHAVLLPADSPTAPHIYAVFTSQWQVGGTRSSAVCAFSLLDIERVFKGKYKELNKETSRWTTYRGPETNPRPGSCSVGPSSDKALTFMKDHFLMDEQVVGTPLLVKSGVEYTRLAVETAQGLDGHSHLVMYLGTTTGSLHKAVVSGDSSAHLVEEIQLFPDPEPVRNLQLAPTQGAVFVGFSGGVWRVPRANCSVYESCVDCVLARDPHCAWDPESRTCCLLSAPNLNSWKQDMERGNPEWACASGPMSRSLRPQSRPQIIKEVLAVPNSILELPCPHLSALASYYWSHGPAAVPEASSTVYNGSLLLIVQDGVGGLYQCWATENGFSYPVISYWVDSQDQTLALDPELAGIPREHVKVPLTRVSGGAALAAQQSYWPHFVTVTVLFALVLSGALIILVASPLRALRARGKVQGCETLRPGEKAPLSREQHLQSPKECRTSASDVDADNNCLGTEVA

SEQ ID NO: 11909 - protein, 51 aa, Homo Sapiens
MAGPCTWVLERPSLHSVATSASCQAGSTRSCFGVQTQRRNSSAASRARTHR

SEQ ID NO: 11910 - protein, 115 aa, Homo Sapiens
MAGPCTWVLERPSLHSVATSASCQAGSTRSCFGVQTQRRNSSAASRARTHSATVKTTSRSSCRSAAVTCSPVAQQPSAPCVPTSTWRTSPWQGTRRGMSSWKMARAVVPSTRISS

SEQ ID NO: 11911 - protein, 91 aa, Homo Sapiens
MLRTAMGLRSWLAAPWGALPPRPPLLLLLLLLLLLQPPPPTWALSPRISLPLGSEERPFLRFEAEHISNYTALLLSRDGRTLYVGAREALF

SEQ ID NO: 11912 - protein, 114 aa, Homo Sapiens
MLRTAMGLRSWLAAPWGALPPRPPLLLLLLLLLLLQPPPPTWALSPRISLPLGSEERPFLRFEAEHISNYTALLLSRDGRTLYVGAREALFALSSNLSFLPGGEYQELLWGADA

SEQ ID NO: 11913 - protein, 121 aa, Homo Sapiens
MLRTAMGLRSWLAAPWGALPPRPPLLLLLLLLLLLQPPPPTWALSPRISLPLGSEERPFLRFEAEHISNYTALLLSRDGRTLYVGAREALFALSSNLSFLPGGEYQELLWGADAEKKQQCS

SEQ ID NO: 11914 - protein, 837 aa, Homo Sapiens
MLRTAMGLRSWLAAPWGALPPRPPLLLLLLLLLLLQPPPPTWALSPRISLPLGSEERPFLRFEAEHISNYTALLLSRDGRTLYVGAREALFALSSNLSFLPGGEYQELLWGADAEKKQQCSFKGKDPQRDCQNYIKILLPLSGSHLFTCGTAAFSPMCTYINMENFTLARDEKGNVLLEDGKGRCPFDPNFKSTALVVDGELYTGTVSSFQGNDPAISRSQSLRPTKTESSLNWLQDPAFVASAYIPESLGSLQGDDDKIYFFFSETGQEFEFFENTIVSRIARICKGDEGGERVLQQRWTSFLKAQLLCSRPDDGFPFNVLQDVFTLSPSPQDWRDTLFYGVFTSQWHRGTTEGSAVCVFTMKDVQRVFSGLYKEVNRETQQWYTVTHPVPTPRPGACITNSARERKINSSLQLPDRVLNFLKDHFLMDGQVRSRMLLLQPQARYQRVAVHRVPGLHHTYDVLFLGTGDGRLHKAVSVGPRVHIIEELQIFSSGQPVQNLLLDTHRGLLYAASHSGVVQVPMANCSLYRSCGDCLLARDPYCAWSGSSCKHVSLYQPQLATRPWIQDIEGASAKDLCSASSVVSPSFVPTGEKPCEQVQFQPNTVNTLACPLLSNLATRLWLRNGAPVNASASCHVLPTGDLLLVGTQQLGEFQCWSLEEGFQQLVASYCPEVVEDGVADQTDEGGSVPVIISTSRVSAPAGGKASWGADRSYWKEFLVMCTLFVLAVLLPVLFLLYRHRNSMKVFLKQGECASVHPKTCPVVLPPETRPLNGLGPPSTPLDHRGYQSLSDSPPGSRVFTESEKRPLSIQDSFVEVSPVCPRPRVRLGSEIRDSVV

SEQ ID NO: 11915 - protein, 837 aa, Homo Sapiens; identical to SEQ ID NO: 11914

SEQ ID NO: 11916 - protein, 63 aa, Homo Sapiens
MLRTAMGLRSWLAAPWGALPPRPPLLLLLLLLLLLQPPPPTWALSPRISLPLGWGYVKTLHRL

SEQ ID NO: 11917 - protein, 461 aa, Homo Sapiens
  misc_feature (1)..(1): Xaa can be any naturally occurring amino acid
XARICKGDEGGERVLQQRWTSFLKAQLLCSRPDDGFPFNVLQDVFTLSPSPQDWRDTLFYGVFTSQWHRGTTEGSAVCVFTMKDVQRVFSGLYKEVNRETQQWYTVTHPVPTPRPGACITNSARERKINSSLQLPDRVLNFLKDHFLMDGQVRSRMLLLQPQARYQRVAVHRVPGLHHTYDVLFLGTGDGRLHKAVSVGPRVHIIEELQIFSSGQPVQNLLLDTHRGLLYAASHSGVVQVPMANCSLYRSCGDCLLARDPYCAWSGSSCKHVSLYQPQLATRPWIQDIEGASAKDLCSASSVVSPSFVPTGEKPCEQVQFQPNTVNTLACPLLSNLATRLWLRNGAPVNASASCHVLPTGDLLLVGTQQLGEFQCWSLEEGFQQLVASYCPEVVEDGVADQTDEGGSVPVIISTSRVSAPAGGKASWGADRSWARTQLLDLSSLYQAVATREDSASSGEIS

SEQ ID NO: 11918 - protein, 120 aa, Homo Sapiens
  misc_feature (1)..(1): Xaa can be any naturally occurring amino acid
XHIIEELQIFSSGQPVQNLLLDTHRGLLYAASHSGVVQVPMANCSLYRSCGDCLLARDPYCAWSGSSCKHVSLYQPQLATRILSGPQAVDPGHRGSQRQGPLQRVFGCVPVFCTNRGEAM

SEQ ID NO: 11919 - protein, 253 aa, Homo Sapiens
  misc_feature (1)..(1): Xaa can be any naturally occurring amino acid
XRSRMLLLQPQARYQRVAVHRVPGLHHTYDVLFLGTGDGRLHKAVSVGPRVHIIEELQIFSSGQPVQNLLLDTHRVSRPTRNPGRGLLYAASHSGVVQVPMANCSLYRSCGDCLLARDPYCAWSGSSCKHVSLYQPQLATRPWIQDIEGASAKDLCSASSVVSPSFVPTGEKPCEQVQFQPNTVNTLACPLLSNLATRLWLRNGAPVNASASCHVLPTGDLLLVGTQQLGEFQCWSLEEGFQQLVASYCPEVV

SEQ ID NO: 11920 - protein, 140 aa, Homo Sapiens
MAPHWAVWLLAARLWGLGIGAEVWWNLVPRKTVSSGELATVVRRFSQTGIQDFLTLTLTEPTGLLYVGAREALFAFSMEALELQGAISWEAPVEKKTECIQKGKNNQTECFNFIRFLQPYNASHLYVCGTYAFQPKCTYV

SEQ ID NO: 11921 - protein, 201 aa, Homo Sapiens
MAPHWAVWLLAARLWGLGIGAEVWWNLVPRKTVSSGELATVVRRFSQTGIQDFLTLTLTEPTGLLYVGAREALFAFSMEALELQGAISWEAPVEKKTECIQKGKNNQTECFNFIRFLQPYNASHLYVCGTYAFQPKCTYVNMLTFTLEHGEFEDGKGKCPYDPAKGHAGLLVDGELYSATLNNFLGTEPIILRNMGPHHSM

SEQ ID NO: 11922 - protein, 833 aa, Homo Sapiens
MAPHWAVWLLAARLWGLGIGAEVWWNLVPRKTVSSGELATVVRRFSQTGIQDFLTLTLTEPTGLLYVGAREALFAFSMEALELQGAISWEAPVEKKTECIQKGKNNQTECFNFIRFLQPYNASHLYVCGTYAFQPKCTYVNMLTFTLEHGEFEDGKGKCPYDPAKGHAGLLVDGELYSATLNNFLGTEPIILRNMGPHHSMKTEYLAFWLNEPHFVGSAYVPESVGSFTGDDDKVYFFFRERAVESDCYAEQVVARVARVCKGDMGGARTLQRKWTTFLKARLACSAPNWQLYFNQLQAMHTLQDTSWHNTTFFGVFQAQWGDMYLSAICEYQLEEIQRVFEGPYKEYHEEAQKWDRYTDPVPSPRPGSCINNWHRRHGYTSSLELPDNILNFVKKHPLMEEQVGPRWSRPLLVKKGTNFTHLVADRVTGLDGATYTVLFIGTGDGWLLKAVSLGPWVHLIEELQLFDQEPMRSLVLSQSKKLLFAGSRSQLVQLPVADCMKYRSCADCVLARDPYCAWSVNTSRCVAVGGHSGSLLIQHVMTSDTSGICNLRGSKKVRPTPKNITVVAGTDLVLPCHLSSNLAHARWTFGGRDLPAEQPGSFLYDARLQALVVMAAQPRHAGAYHCFSEEQGARLAAEGYLVAVVAGPSVTLEARAPLENLGLVWLAVVALGAVCLVLLLLVLSLRRRLREELEKGAKATERTLVYPLELPKEPTSPPFRPCPEPDEKLWDPVGYYYSDGSLKIVPGHARCQPGGGPPSPPPGIPGQPLPSPTRLHLGGGRNSNANGYVRLQLGGEDRGGLGHPLPELADELRRKLQQRQPLPDSNPEESSV

SEQ ID NO: 11923 - protein, 59 aa, Homo Sapiens
MRMCTPIRGLLMALAVMFGTAMAFAPIPRITWEHREVHLVQFHEPDIYNYSALLLSEDK

SEQ ID NO: 11924 - protein, 66 aa, Homo Sapiens
MRMCTPIRGLLMALAVMFGTAMAFAPIPRITWEHREVHLVQFHEPDIYNYSALLLSEDKDTLYIGA

SEQ ID NO: 11925 - protein, 76 aa, Homo Sapiens
MRMCTPIRGLLMALAVMFGTAMAFAPIPRITWEHREVHLVQFHEPDIYNYSALLLSEDKDTLYIGAREAVFAVNAL

SEQ ID NO: 11926 - protein, 146 aa, Homo Sapiens
MRMCTPIRGLLMALAVMFGTAMAFAPIPRITWEHREVHLVQFHEPDIYNYSALLLSEDKDTLYIGAREAVFAVNALNISEKQHEVYWKVSEDKKAKCAEKGKSKQTECLNYIRVLQPLSATSLYVCGTNAFQPACDHLNLTSFKFL

SEQ ID NO: 11927 - protein, 862 aa, Homo Sapiens
MRMCTPIRGLLMALAVMFGTAMAFAPIPRITWEHREVHLVQFHEPDIYNYSALLLSEDKDTLYIGAREAVFAVNALNISEKQHEVYWKVSEDKKAKCAEKGKSKQTECLNYIRVLQPLSATSLYVCGTNAFQPACDHLNLTSFKFLGKNEDGKGRCPFDPAHSYTSVMVDGELYSGTSYNFLGSEPIISRNSSHSPLRTEYAIPWLNEPSFVFADVIRKSPDSPDGEDDRVYFFFTEVSVEYEFVFRVLIPRIARVCKGDQGGLRTLQKKWTSFLKARLICSRPDSGLVFNVLRDVFVLRSPGLKVPVFYALFTPQLNNVGLSAVCAYNLSTAEEVFSHGKYMQSTTVEQSHTKWVRYNGPVPKPRPGACIDSEARAANYTSSLNLPDKTLQFVKDHPLMDDSVTPIDNRPRLIKKDVNYTQIVVDRTQALDGTVYDVMFVSTDRGALHKAISLEHAVHIIEETQLFQDFEPVQTLLLSSKKGNRFVYAGSNSGVVQAPLAFCGKHGTCEDCVLARDPYCAWSPPTATCVALHQTESPSRGLIQEMSGDASVCPDKSKGSYRQHFFKHGGTAELKCSQKSNLARVFWKFQNGVLKAESPKYGLMGRKNLLIFNLSEGDSGVYQCLSEERVKNKTVFQVVAKHVLEVKVVPKPVVAPTLSVVQTEGSRIATKVLVASTQGSSPPTPAVQATSSGAITLPPKPAPTGTSCEPKIVINTVPQLHSEKTMYLKSSDNRLLMSLFLFFFVLFLCLFFYNCYKGYLPRQCLKFRSALLIGKKKPKSDFCDREQSLKETLVEPGSFSQQNGEHPKPALDTGYETEQDTITSKVPTDREDSQRIDDLSARDKPFDVKCELKFADSDADGD

SEQ ID NO: 11928 - protein, 738 aa, Homo Sapiens
MRMCTPIRGLLMALAVMFGTAMAFAPIPRITWEHREVHLVQFHEPDIYNYSALLLSEDKDTLYIGAREAVFAVNALNISEKQHEVYWKVSEDKKAKCAEKGKSKQTECLNYIRVLQPLSATSLYVCGTNAFQPACDHLNLTSFKFLGKNEDGKGRCPFDPAHSYTSVMVDGELYSGTSYNFLGSEPIISRNSSHSPLRTEYAIPWLNEPSFVFADVIRKSPDSPDGEDDRVYFFFTEVSVEYEFVFRVLIPRIARVCKGDQGGLRTLQKKWTSFLKARLICSRPDSGLVFNVLRDVFVLRSPGLKVPVFYALFTPQLNNVGLSAVCAYNLSTAEEVFSHGKYMQSTTVEQSHTKWVRYNGPVPKPRPGACIDSEARAANYTSSLNLPDKTLQFVKDHPLMDDSVTPIDNRPRLIKKDVNYTQIVVDRTQALDGTVYDVMFVSTDRGALHKAISLEHAVHIIEETQLFQDFEPVQTLLLSSKKGNRFVYAGSNSGVVQAPLAFCGKHGTCEDCVLARDPYCAWSPPTATCVALHQTESPSRGLIQEMSGDASVCPASSPKPLPPPGSSSLSCLGHVGDRRLSSPWTPWPASGAGPDSSSRVSLLPPFLSDQAQHVHALGNFYLFCQATGPADIRFVWEKNGRALETCVPVQTHALPDGRAHALSWLQDAIRESAEYRCSVLSSAGNKTSKVQVAVMRPEVTHQERWTRELSAWRAVAGEHDRMMQSWRKAWESCSKDTL

SEQ ID NO: 11929 - protein, 738 aa, Homo Sapiens; identical to SEQ ID NO: 11928

SEQ ID NO: 11930 - protein, 862 aa, Homo Sapiens; identical to SEQ ID NO: 11927

SEQ ID NO: 11931 - protein, 862 aa, Homo Sapiens; identical to SEQ ID NO: 11927

SEQ ID NO: 11932 - protein, 548 aa, Homo Sapiens
MRMCTPIRGLLMALAVMFGTAMAFAPIPRITWEHREVHLVQFHEPDIYNYSALLLSEDKDTLYIGAREAVFAVNALNISEKQHEVYWKVSEDKKAKCAEKGKSKQTECLNYIRVLQPLSATSLYVCGTNAFQPACDHLNLTSFKFLGKNEDGKGRCPFDPAHSYTSVMVDGELYSGTSYNFLGSEPIISRNSSHSPLRTEYAIPWLNEPSFVFADVIRKSPDSPDGEDDRVYFFFTEVSVEYEFVFRVLIPRIARVCKGDQGGLRTLQKKWTSFLKARLICSRPDSGLVFNVLRDVFVLRSPGLKVPVFYALFTPQLNNVGLSAVCAYNLSTAEEVFSHGKYMQSTTVEQSHTKWVRYNGPVPKPRPGACIDSEARAANYTSSLNLPDKTLQFVKDHPLMDDSVTPIDNRPRLIKKDVNYTQIVVDRTQALDGTVYDVMFVSTDRGALHKAISLEHAVHIIEETQLFQDFEPVQTLLLSSKKVLQTFALSGRRMGELWRPVSLCRPMHCPMAGPMHSAGCRTPSGKALSIAALSSPQQGTRLRRCRLL

SEQ ID NO: 11933 - protein, 738 aa, Homo Sapiens; identical to SEQ ID NO: 11928

SEQ ID NO: 11934 - protein, 862 aa, Homo Sapiens; identical to SEQ ID NO: 11927

SEQ ID NO: 11935 - protein, 548 aa, Homo Sapiens; identical to SEQ ID NO: 11932

SEQ ID NO: 11936 - protein, 123 aa, Homo Sapiens
MWTQRWKRSVSPGPADIRFVWEKNGRALETCVPVQTHALPDGRAHALSWLQDAIRESAEYRCSVLSSAGNKTSKVQVAVMRPEVTHQERWTRELSAWRAVAGEHDRMMQSWRKAWESCSKDTL

SEQ ID NO: 11937 - protein, 49 aa, Homo Sapiens
MPASAARPRPGPGQPTASPFPLLLLAVLSGPVSGRVPRSVPRTSLPISD

SEQ ID NO: 11938 - protein, 770 aa, Homo Sapiens
MPASAARPRPGPGQPTASPFPLLLLAVLSGPVSGRVPRSVPRTSLPISEADSCLTRFAVPHTYNYSVLLVDPASHTLYVGARDTIFALSLPFSGERPRRIDWMVPEAHRQNCRKKGKKEDECHNFVQILAIANASHLLTCGTFAFDPKCGVIDVSRFQQVERLESGRGKCPFEPAQRSAAVMAGGVLYAATVKNYLGTEPIITRAVGRAEDWIRTDTLPSWLNAPAFVAAVALSPAEWGDEDGDDEIYFFFTETSRAFDSYERIKVPRVARVCAGDLGGRKTLQQRWTTFLKADLLCPGPEHGRASSVLQDVAVLRPELGAGTPIFYGIFSSQWEGATISAVCAFRPQDIRTVLNGPFRELKHDCNRGLPVVDNDVPQPRPGECITNNMKLRHFGSSLSLPDRVLTFIRDHPLMDRPVFPADGHPLLVTTDTAYLRVVAHRVTSLSGKEYDVLYLGTEDGHLHRAVRIGAQLSVLEDLALFPEPQPVENMKLYHSWLLVGSRTEVTQVNTTNCGRLQSCSECILAQDPVCAWSFRLDECVAHAGEHRGLVQDIESADVSSLCPKEPGERPVVFEVPVATAAHVVLPCSPSSAWASCVWHQPSGVTALTPRRDGLEVVVTPGAMGAYACECQEGGAAHVVAAYSLVWGSQRDAPSRAHTVGAGLAGFFLGILAASLTLILIGRRQQRRRQRELLARDKVGLDLGAPPSGTTSYSQDPPSPSPEDERLPLALAKRGSGFGGFSPPFLLDPCPSPAHIRLTGAPLATCDETSI

SEQ ID NO: 11939 - protein, 160 aa, Homo Sapiens
MPASAARPRPGPGQPTASPFPLLLLAVLSGPVSGRVPRSVPRTSLPISEADSCLTRFAVPHTYNYSVLLVDPASHTLYVGARDTIFALSLPFSGERPRRIDWMVPEAHRQNCRKKGKKEDECHNFVQILAIANASHLLTCGTFAFDPKCGVIGGSSMLPL

SEQ ID NO: 11940 - protein, 165 aa, Homo Sapiens
MPASAARPRPGPGQPTASPFPLLLLAVLSGPVSGRVPRSVPRTSLPISEADSCLTRFAVPHTYNYSVLLVDPASHTLYVGARDTIFALSLPFSGERPRRIDWMVPEAHRQNCRKKGKKEDVSRFQQVERLESGRGKCPFEPAQRSAAVMAGGVLYAATVKNYLGT

SEQ ID NO: 11941 - protein, 737 aa, Homo Sapiens
MPASAARPRPGPGQPTASPFPLLLLAVLSGPVSGRVPRSVPRTSLPISEADSCLTRFAVPHTYNYSVLLVDPASHTLYVGARDTIFALSLPFSGERPRRIDWMVPEAHRQNCRKKGKKEDVSRFQQVERLESGRGKCPFEPAQRSAAVMAGGVLYAATVKNYLGTEPIITRAVGRAEDWIRTDTLPSWLNAPAFVAAVALSPAEWGDEDGDDEIYFFFTETSRAFDSYERIKVPRVARVCAGDLGGRKTLQQRWTTFLKADLLCPGPEHGRASSVLQDVAVLRPELGAGTPIFYGIFSSQWEGATISAVCAFRPQDIRTVLNGPFRELKHDCNRGLPVVDNDVPQPRPGECITNNMKLRHFGSSLSLPDRVLTFIRDHPLMDRPVFPADGHPLLVTTDTAYLRVVAHRVTSLSGKEYDVLYLGTEDGHLHRAVRIGAQLSVLEDLALFPEPQPVENMKLYHSWLLVGSRTEVTQVNTTNCGRLQSCSECILAQDPVCAWSFRLDECVAHAGEHRGLVQDIESADVSSLCPKEPGERPVVFEVPVATAAHVVLPCSPSSAWASCVWHQPSGVTALTPRRDGLEVVVTPGAMGAYACECQEGGAAHVVAAYSLVWGSQRDAPSRAHTVGAGLAGFFLGILAASLTLILIGRRQQRRRQRELLARDKVGLDLGAPPSGTTSYSQDPPSPSPEDERLPLALAKRGSGFGGFSPPFLLDPCPSPAHIRLTGAPLATCDETSI

SEQ ID NO: 11942 - protein, 178 aa, Homo Sapiens
MPASAARPRPGPGQPTASPFPLLLLAVLSGPVSGRVPRSVPRTSLPISEADSCLTRFAVPHTYNYSVLLVDPASHTLYVGARDTIFALSLPFSGERPRRIDWMVPEAHRQNCRKKGKKEGDLGGRKTLQQRWTTFLKADLLCPGPEHGRASSVLQDVAVLRPELGAGTPIFYGIFSSQ

SEQ ID NO: 11943 - protein, 615 aa, Homo Sapiens
MPASAARPRPGPGQPTASPFPLLLLAVLSGPVSGRVPRSVPRTSLPISEADSCLTRFAVPHTYNYSVLLVDPASHTLYVGARDTIFALSLPFSGERPRRIDWMVPEAHRQNCRKKGKKEGDLGGRKTLQQRWTTFLKADLLCPGPEHGRASSVLQDVAVLRPELGAGTPIFYGIFSSQWEGATISAVCAFRPQDIRTVLNGPFRELKHDCNRGLPVVDNDVPQPRPGECITNNMKLRHFGSSLSLPDRVLTFIRDHPLMDRPVFPADGHPLLVTTDTAYLRVVAHRVTSLSGKEYDVLYLGTEDGHLHRAVRIGAQLSVLEDLALFPEPQPVENMKLYHSWLLVGSRTEVTQVNTTNCGRLQSCSECILAQDPVCAWSFRLDECVAHAGEHRGLVQDIESADVSSLCPKEPGERPVVFEVPVATAAHVVLPCSPSSAWASCVWHQPSGVTALTPRRDGLEVVVTPGAMGAYACECQEGGAAHVVAAYSLVWGSQRDAPSRAHTVGAGLAGFFLGILAASLTLILIGRRQQRRRQRELLARDKVGLDLGAPPSGTTSYSQDPPSPSPEDERLPLALAKRGSGFGGFSPPFLLDPCPSPAHIRLTGAPLATCDETSI

SEQ ID NO: 11944 - protein, 127 aa, Homo Sapiens
MPASAARPRPGPGQPTASPFPLLLLAVLSGPVSGRVPRSVPRTSLPISEADSCLTRFAVPHTYNYSVLLVDPASHTLYVGARDTIFALSLPFSGERPRRIDWMVPEAHRQNCRKKGKKEGGSSMLPL

SEQ ID NO: 11945 - protein, 68 aa, Homo Sapiens
MPASAARPRPGPGQPTASPFPLLLLAVLSGPVSGRVPRSVPRTSLPISVFRRKNRGGGYDPLKRCGRS

SEQ ID NO: 11946 - protein, 127 aa, Homo Sapiens
MGSMSPPSAWPCVLDGPETRQDLCQPPKPCVHSHAHMEECLSAGLQCPHPHLLLVHSCFIPASGLGVPSQLPHPIWSSSPAPCGDLFVKSLGTGQPGEVRLHHSPPLPSCVALVNQPPHSPWSFSRV

SEQ ID NO: 11947 - protein, 170 aa, Homo Sapiens
MWGRLWPLLLSILTATAVPGPSLRRPSRELDATPRMTIPYEELSGTRHFKGQAQNYSTLLLEEASARLLVGARGALFSLSANDIGDGAHKEIHWEASPEMQSKCHQKGKNNQTECFNHVRFLQRLNSTHLYACGTHAFQPLCAAIDAEAFTLPTSFEEGKEKCPYDPARG

SEQ ID NO: 11948 - protein, 843 aa, Homo Sapiens
MWGRLWPLLLSILTATAVPGPSLRRPSRELDATPRMTIPYEELSGTRHFKGQAQNYSTLLLEEASARLLVGARGALFSLSANDIGDGAHKEIHWEASPEMQSKCHQKGKNNQTECFNHVRFLQRLNSTHLYACGTHAFQPLCAAIDAEAFTLPTSFEEGKEKCPYDPARGFTGLIIDGGLYTATRYEFRSIPDIRRSRHPHSLRTEETPMHWLNDAEFVFSVLVRESKASAVGDDDKVYYFFTERATEEGSGSFTQSRSSHRVARVARVCKGDLGGKKILQKKWTSFLKARLICHIPLYETLRGVCSLDAETSSRTHFYAAFTLSTQWKTLEASAICRYDLAEIQAVFAGPYMEYQDGSRRWGRYEGGVPEPRPGSCITDSLRSQGYNSSQDLPSLVLDFVKLHPLMARPVVPTRGRPLLLKRNIRYTHLTGTPVTTPAGPTYDLLFLGTADGWIHKAVVLGSGMHIIEETQVFRESQSVENLVISLLQHSLYVGAPSGVIQLPLSSCSRYRSCYDCILARDPYCGWDPGTHACAAATTIANRSQGSRTALIQDIERGNRGCESSRDTGPPPPLKTRSVLRGDDVLLPCDQPSNLARALWLLNGSMGLSDGQGGYRVGVDGLLVTDAQPEHSGNYGCYAEENGLRTLLASYSLTVRPATPAPAPKAPATPGAQLAPDVRLLYVLAIAALGGLCLILASSLLYVACLREGRRGRRRKYSLGRASRAGGSAVQLQTVSGQCPGEEDEGDDEGAGGLEGSCLQIIPGEGAPAPPPPPPPPPPAELTNGLVALPSRLRRMNGNSYVLLRQSNNGVPAGPCSFAEELSRILEKRKHTQLVEQLDESSV

SEQ ID NO: 11949 - protein, 838 aa, Homo Sapiens
MWGRLWPLLLSILTATAVPGPSLRRPSRELDATPRMTIPYEELSGTRHFKGQAQNYSTLLLEEASARLLVGARGALFSLSANDIGDGAHKEIHWEASPEMQSKCHQKGKNNQTECFNHVRFLQRLNSTHLYACGTHAFQPLCAAIDAEAFTLPTSFEEGKEKCPYDPARGFTGLIIDGGLYTATRYEFRSIPDIRRSRHPHSLRTEETPMHWLNDAEFVFSVLVRESKASAVGDDDKVYYFFTERATEEGSGSFTQSRSSHRVARVARVCKGDLGGKKILQKKWTSFLKARLICHIPLYETLRGVCSLDAETSSRTHFYAAFTLSTQWKTLEASAICRYDLAEIQAVFAGPYMEYQDGSRRWGRYEGGVPEPRPGSCITDSLRSQGYNSSQDLPSLVLDFVKLHPLMARPVVPTRGRPLLLKRNIRYTHLTGTPVTTPAGPTYDLLFLGTADGWIHKAVVLGSGMHIIEETQVFRESQSVENLVISLLQHSLYVGAPSGVIQLPLSSCSRYRSCYDCILARDPYCGWDPGTHACAAATTIANRTALIQDIERGNRGCESSRDTGPPPPLKTRSVLRGDDVLLPCDQPSNLARALWLLNGSMGLSDGQGGYRVGVDGLLVTDAQPEHSGNYGCYAEENGLRTLLASYSLTVRPATPAPAPKAPATPGAQLAPDVRLLYVLAIAALGGLCLILASSLLYVACLREGRRGRRRKYSLGRASRAGGSAVQLQTVSGQCPGEEDEGDDEGAGGLEGSCLQIIPGEGAPAPPPPPPPPPPAELTNGLVALPSRLRRMNGNSYVLLRQSNNGVPAGPCSFAEELSRILEKRKHTQLVEQLDESSV

SEQ ID NO: 11950 - protein, 702 aa, Homo Sapiens
MWGRLWPLLLSILTATAVPGPSLRRPSRELDATPRMTIPYEELSGTRHFKGQAQNYSTLLLEEASARLLVGARGALFSLSANDIGDGAHKEIHWEASPEMQSKCHQKGKNNQTECFNHVRFLQRLNSTHLYACGTHAFQPLCAAIDAEAFTLPTSFEEGKEKCPYDPARGFTGLIIDGGLYTATRYEFRSIPDIRRSRHPHSLRTEETPMHWLNDAEFVFSVLVRESKASAVGDDDKVYYFFTERATEEGSGSFTQSRSSHRVARVARVCKGDLGGKKILQKKWTSFLKARLICHIPLYETLRGVCSLDAETSSRTHFYAAFTLSTQWKTLEASAICRYDLAEIQAVFAGPYMEYQDGSRRWGRYEGGVPEPRPGSCITDSLRSQGYNSSQDLPSLVLDFVKLHPLMARPVVPTRGRPLLLKRNIRYTHLTGTPVTTPAGPTYDLLFLGTADGWIHKAVVLGSGMHIIEETQVFRESQSVENLVISLLQHSLYVGAPSGVIQLPLSSCSRYRSCYDCILARDPYCGWDPGTHACAAATTIANRSQGSRTALIQDIERGNRGCESSRDTGRALQVHMGSMSPPSAWPCVLDGPETRQDLCQPPKPCVHSHAHMEECLSAGLQCPHPHLLLVHSCFIPASGLGVPSQLPHPIWSSSPAPCGDLFVKSLGTGQPGEVRLHHSPPLPSCVALVNQPPHSPWSFSRV

SEQ ID NO: 11951 - protein, 522 aa, Homo Sapiens
MWGRLWPLLLSILTATAVPGPSLRRPSRELDATPRMTIPYEELSGTRHFKGQAQNYSTLLLEEASARLLVGARGALFSLSANDIGDGAHKEIHWEASPEMQSKCHQKGKNNQTECFNHVRFLQRLNSTHLYACGTHAFQPLCAAIDAEAFTLPTSFEEGKEKCPYDPARGFTGLIIDGGLYTATRYEFRSIPDIRRSRHPHSLRTEETPMHWLNDAEFVFSVLVRESKASAVGDDDKVYYFFTERATEEGSGSFTQSRSSHRVARVARVCKGDLGGKKILQKKWTSFLKARLICHIPLYETLRGVCSLDAETSSRTHFYAAFTLSTQWKTLEASAICRYDLAEIQAVFAGPYMEYQDGSRRWGRYEGGVPEPRPGSCITDSLRSQGYNSSQDLPSLVLDFVKLHPLMARPVVPTRGRPLLLKRNIRYTHLTGTPVTTPAGPTYDLLFLGTADGWIHKAVVLGSGMHIIEETQVFRESQSVENLVISLLQHSLYVGAPSGVIQLPLSSCSRYRSCYDCILARD

SEQ ID NO: 11952 - protein, 838 aa, Homo Sapiens; identical to SEQ ID NO: 11949

SEQ ID NO: 11953 - protein, 132 aa, Homo Sapiens
  misc_feature (1)..(1): Xaa can be any naturally occurring amino acid
XREGRRGRRRKYSLGRASRAGGSAVQLQTVSGRALQVHMGSMSPPSAWPCVLDGPETRQDLCQPPKPCVHSHAHMEECLSAGLQCPHPHLLLVHSCFIPASGLGVPSQLPHPIWSSSPAPCGDLFVKSLGTG

SEQ ID NO: 11954 - protein, 254 aa, Homo Sapiens
MKGTCVIAWLFSSLGLWRLAHPEAQGTTQCQRTEHPVISYKEIGPWLREFRAKNAVDFSQLTFDPGQKELVVGARNYLFRLQLEDLSLIQAVEWECDEATKKACYSKGKSKEECQNYIRVLLVGGDRLFTCGTNAFTPVCTNRSLSNLTEIHDQISGMARCPYSPQHNSTALLTAGGELYAATAMDFPGRDPAIYRSLGILPPLRTAQYNSKWLNEPNFVSSYDIGNFTYFFFRENAVEHDCGKTVFSRAARVC

SEQ ID NO: 11955 - protein, 1074 aa, Homo Sapiens
MKGTCVIAWLFSSLGLWRLAHPEAQGTTQCQRTEHPVISYKEIGPWLREFRAKNAVDFSQLTFDPGQKELVVGARNYLFRLQLEDLSLIQAVEWECDEATKKACYSKGKSKEECQNYIRVLLVGGDRLFTCGTNAFTPVCTNRSLSNLTEIHDQISGMARCPYSPQHNSTALLTAGGELYAATAMDFPGRDPAIYRSLGILPPLRTAQYNSKWLNEPNFVSSYDIGNFTYFFFRENAVEHDCGKTVFSRAARVCKNDIGGRFLLEDTWTTFMKARLNCSRPGEVPFYYNELQSTFFLPELDLIYGIFTTNVNSIAASAVCVFNLSAIAQAFSGPFKYQENSRSAWLPYPNPNPHFQCGTVDQGLYVNLTERNLQDAQKFILMHEVVQPVTTVPSFMEDNSRFSHVAVDVVQGREALVHIIYLATDYGTIKKVRVPLNQTSSSCLLEEIELFPERRREPIRSLQILHSQSVLFVGLREHVVKIPLKRCQFYRTRSTCIGAQDPYCGWDVVMKKCTSLEESLSMTQWEQSISACPTRNLTVDGHFGVWSPWTPCTHTDGSAVGSCLCRTRSCDSPAPQCGGWQCEGPGMEIANCSRNGGWTPWTSWSPCSTTCGIGFQVRQRSCSNPTPRHGGRVCVGQNREERYCNEHLLCPPHMFWTGWGPWERCTAQCGGGIQARRRICENGPDCAGCNVEYQSCNTNPCPELKKTTPWTPWTPVNISDNGGHYEQRFRYTCKARLADPNLLEVGRQRIEMRYCSSDGTSGCSTDGLSGDFLRAGRYSAHTVNGAWSAWTSWSQCSRDCSRGIRNRKRVCNNPEPKYGGMPCLGPSLEYQECNILPCPVDGVWSCWSPWTKCSATCGGGHYMRTRSCSNPAPAYGGDICLGLHTEEALCNTQPCPESWSEWSDWSECEASGVQVRARQCILLFPMGSQCSGNTTESRPCVFDSNFIPEVSVARSSSVEEKRCGEFNMFHMIAVGLSSSILGCLLTLLVYTYCQRYQQQSHDATVIHPVSPAPLNTSITNHINKLDKYDSVEAIKAFNKNNLILEERNKYFNPHLTGKTYSNAYFTDLNNYDEY

SEQ ID NO: 11956 - protein, 409 aa, Homo Sapiens
MKNASPETREGVIRESYLKGHDQLVPVTLLAIAVILAFVMGAVFSGITVYCVCDHRRKDVAVVQRKEKELTHSRRGSMSSVTKLSGLFGDTQSKDPKPEAILTPLMHNGKLATPGNTAKMLIKADQHHLDLTALPTPESTPTLQQKRKPSRGSREWERNQNLINACTKDMPPMGSPVIPTDLPLRASPSHIPSVVVLPITQQGYQHEYVDQPKMSEVAQMALEDQAATLEYKTIKEHLSSKSPNHGVNLVENLDSLPPKVPQREASLGPPGASLSQTGLSKRLEMHHSSSYGVDYKRSYPTNSLTRSHQATTLKRNNTNSSNSSHLSRNQSFGRGDNPPPAPQRVDSIQVHSSQPSGQAVTVSRQPSLNAYNSLTRSGLKRTPSLKPDVPPKPSFAPLSTSMKPNDACT

SEQ ID NO: 11957 - protein, 457 aa, Homo Sapiens
MKTGHSSSLLPSTTTSDSTAQEGYESRGGMLDWKHLLDSPDSTDPLGAVSSHNHQDKKGVIRESYLKGHDQLVPVTLLAIAVILAFVMGAVFSGITVYCVCDHRRKDVAVVQRKEKELTHSRRGSMSSVTKLSGLFGDTQSKDPKPEAILTPLMHNGKLATPGNTAKMLIKADQHHLDLTALPTPESTPTLQQKRKPSRGSREWERNQNLINACTKDMPPMGSPVIPTDLPLRASPSHIPSVVVLPITQQGYQHEYVDQPKMSEVAQMALEDQAATLEYKTIKEHLSSKSPNHGVNLVENLDSLPPKVPQREASLGPPGASLSQTGLSKRLEMHHSSSYGVDYKRSYPTNSLTRSHQATTLKRNNTNSSNSSHLSRNQSFGRGDNPPPAPQRVDSIQVHSSQPSGQAVTVSRQPSLNAYNSLTRSGLKRTPSLKPDVPPKPSFAPLSTSMKPNDACT

SEQ ID NO: 11958 - protein, 114 aa, Homo Sapiens
MRSEALLLYFTLLHFAGAGFPEDSEPISISHGNYTKQYPVFVGHKPGRNTTQRHRLDIQMIMIMNGTLYIAARDHIYTVDIDTSHTEEIYCSKKLTWKSRQADVDTCRMKGKHK

SEQ ID NO: 11959 - protein, 159 aa, Homo Sapiens
MRSEALLLYFTLLHFAGAGFPEDSEPISISHGNYTKQYPVFVGHKPGRNTTQRHRLDIQMIMIMNGTLYIAARDHIYTVDIDTSHTEEIYCSKKLTWKSRQADVDTCRMKGKHKDECHNFIKVLLKKNDDALFVCGTNAFNPSCRNYKMDTLEPFGDEF

SEQ ID NO: 11960 - protein, 1047 aa, Homo Sapiens
MRSEALLLYFTLLHFAGAGFPEDSEPISISHGNYTKQYPVFVGHKPGRNTTQRHRLDIQMIMIMNGTLYIAARDHIYTVDIDTSHTEEIYCSKKLTWKSRQADVDTCRMKGKHKDECHNFIKVLLKKNDDALFVCGTNAFNPSCRNYKMDTLEPFGDEFSGMARCPYDAKHANVALFADGKLYSATVTDFLAIDAVIYRSLGESPTLRTVKHDSKWLKEPYFVQAVDYGDYIYFFFREIAVEYNTMGKVVFPRVAQVCKNDMGGSQRVLEKQWTSFLKARLNCSVPGDSHFYFNILQAVTDVIRINGRDVVLATFSTPYNSIPGSAVCAYDMLDIASVFTGRFKEQKSPDSTWTPVPDERVPKPRPGCCAGSSSLERYATSNEFPDDTLNFIKTHPLMDEAVPSIFNRPWFLRTMVRYRLTKIAVDTAAGPYQNHTVVFLGSEKGIILKFLARIGNSGFLNDSLFLEEMSVYNSEKCSYDGVEDKRIMGMQLDRASSSLYVAFSTCVIKVPLGRCERHGKCKKTCIASRDPYCGWIKEGGACSHLSPNSRLTFEQDIERGNTDGLGDCHNSFVALNDISTPLPDNEMSYNTVYGHSSSLLPSTTTSDSTAQEGYESRGGMLDWKHLLDSPDSTDPLGAVSSHNHQDKKGVIRESYLKGHDQLVPVTLLAIAVILAFVMGAVFSGITVYCVCDHRRKDVAVVQRKEKELTHSRRGSMSSVTKLSGLFGDTQSKDPKPEAILTPLMHNGKLATPGNTAKMLIKADQHHLDLTALPTPESTPTLQQKRKPSRGSREWERNQNLINACTKDMPPMGSPVIPTDLPLRASPSHIPSVVVLPITQQGYQHEYVDQPKMSEVAQMALEDQAATLEYKTIKEHLSSKSPNHGVNLVENLDSLPPKVPQREASLGPPGASLSQTGLSKRLEMHHSSSYGVDYKRSYPTNSLTRSHQATTLKRNNTNSSNSSHLSRNQSFGRGDNPPPAPQRVDSIQVHSSQPSGQAVTVSRQPSLNAYNSLTRSGLKRTPSLKPDVPPKPSFAPLSTSMKPNDACT

SEQ ID NO: 11961 - protein, 1030 aa, Homo Sapiens
MRSEALLLYFTLLHFAGAGFPEDSEPISISHGNYTKQYPVFVGHKPGRNTTQRHRLDIQMIMIMNGTLYIAARDHIYTVDIDTSHTEEIYCSKKLTWKSRQADVDTCRMKGKHKDECHNFIKVLLKKNDDALFVCGTNAFNPSCRNYKMDTLEPFGDEFSGMARCPYDAKHANVALFADGKLYSATVTDFLAIDAVIYRSLGESPTLRTVKHDSKWLKEPYFVQAVDYGDYIYFFFREIAVEYNTMGKVVFPRVAQVCKNDMGGSQRVLEKQWTSFLKARLNCSVPGDSHFYFNILQAVTDVIRINGRDVVLATFSTPYNSIPGSAVCAYDMLDIASVFTGRFKEQKSPDSTWTPVPDERVPKPRPGCCAGSSSLERYATSNEFPDDTLNFIKTHPLMDEAVPSIFNRPWFLRTMVRYRLTKIAVDTAAGPYQNHTVVFLGSEKGIILKFLARIGNSGFLNDSLFLEEMSVYNSEKCSYDGVEDKRIMGMQLDRASSSLYVAFSTCVIKVPLGRCERHGKCKKTCIASRDPYCGWIKEGGACSHLSPNSRLTFEQDIERGNTDGLGDCHNSFVALNGHSSSLLPSTTTSDSTAQEGYESRGGMLDWKHLLDSPDSTDPLGAVSSHNHQDKKGVIRESYLKGHDQLVPVTLLAIAVILAFVMGAVFSGITVYCVCDHRRKDVAVVQRKEKELTHSRRGSMSSVTKLSGLFGDTQSKDPKPEAILTPLMHNGKLATPGNTAKMLIKADQHHLDLTALPTPESTPTLQQKRKPSRGSREWERNQNLINACTKDMPPMGSPVIPTDLPLRASPSHIPSVVVLPITQQGYQHEYVDQPKMSEVAQMALEDQAATLEYKTIKEHLSSKSPNHGVNLVENLDSLPPKVPQREASLGPPGASLSQTGLSKRLEMHHSSSYGVDYKRSYPTNSLTRSHQATTLKRNNTNSSNSSHLSRNQSFGRGDNPPPAPQRVDSIQVHSSQPSGQAVTVSRQPSLNAYNSLTRSGLKRTPSLKPDVPPKPSFAPLSTSMKPNDACT

SEQ ID NO: 11962 - protein, 1030 aa, Homo Sapiens; identical to SEQ ID NO: 11961

SEQ ID NO: 11963 - protein, 545 aa, Homo Sapiens
  misc_feature (1)..(1): Xaa can be any naturally occurring amino acid
XYQNHTVVFLGSEKGIILKFLARIGNSGFLNDSLFLEEMSVYNSEKCSYDGVEDKRIMGMQLDRASSSLYVAFSTCVIKVPLGRCERHGKCKKTCIASRDPYCGWIKEGGACSHLSPNSRLTFEQDIERGNTDGLGDCHNSFVALNGVIRESYLKGHDQLVPVTLLAIAVILAFVMGAVFSGITVYCVCDHRRKDVAVVQRKEKELTHSRRGSMSSVTKLSGLFGDTQSKDPKPEAILTPLMHNGKLATPGNTAKMLIKADQHHLDLTALPTPESTPTLQQKRKPSRGSREWERNQNLINACTKDMPPMGSPVIPTDLPLRASPSHIPSVVVLPITQQGYQHEYVDQPKMSEVAQMALEDQAATLEYKTIKEHLSSKSPNHGVNLVENLDSLPPKVPQREASLGPPGASLSQTGLSKRLEMHHSSSYGVDYKRSYPTNSLTRSHQATTLKRNNTNSSNSSHLSRNQSFGRGDNPPPAPQRVDSIQVHSSQPSGQAVTVSRQPSLNAYNSLTRSGLKRTPSLKPDVPPKPSFAPLSTSMKPNDACT

SEQ ID NO: 11964 - protein, 930 aa, Homo Sapiens
MPRAPHFMPLLLLLLLLSLPHTQAAFPQDPLPLLISDLQGTSPLSWFRGLEDDAVAAELGLDFQRFLTLNRTLLVAARDHVFSFDLQAEEEGEGLVPNKYLTWRSQDVENCAVRGKLTDECYNYIRVLVPWDSQTLLACGTNSFSPVCRSYGITSLQQEGEELSGQARCPFDATQSNVAIFAEGSLYSATAADFQASDAVVYRSLGPQPPLRSAKYDSKWLREPHFVQALEHGDHVYFFFREVSVEDARLGRVQFSRVARVCKRDMGGSPRALDRHWTSFLKLRLNCSVPGDSTFYFDVLQALTGPVNLHGRSALFGVFTTQTNSIPGSAVCAFYLDEIERGFEGKFKEQRSLDGAWTPVSEDRVPSPRPGSCAGVGGAALFSSSRDLPDDVLTFIKAHPLLDPAVPPVTHQPLLTLTSRALLTQVAVDGMAGPHSNITVMFLGSNDGTVLKVLTPGGRSGGPEPILLEEIDAYSPARCSGKRTAQTARRIIGLELDTEGHRLFVAFSGCIVYLPLSRCARHGACQRSCLASQDPYCGWHSSRGCVDIRGSGGTDVDQAGNQESMEHGDCQDGATGSQSGPGDSAYGVRRDLPPASASRSVPIPLLLASVAAAFALGASVSGLLVSCACRRAHRRRGKDIETPGLPRPLSLRSLARLHGGGPEPPPPSKDGDAVQTPQLYTTFLPPPEGVPPPELACLPTPESTPELPVKHLRAAGDPWEWNQNRNNAKEGPGRSRGGHAAGGPAPRVLVRPPPPGCPGQAVEVTTLEELLRYLHGPQPPRKGAEPPAPLTSRALPPEPAPALLGGPSPRPHECASPLRLDVPPEGRCASAPARPALSAPAPRLGVGGGRRLPFSGHRAPPALLTRVPSGGPSRYSGGPGKHLLYLGRPEGYRGRALKRVDVEKPQLSLKPPLVGPSSRQAVPNGGRFNF

SEQ ID NO: 11965 - protein, 930 aa, Homo Sapiens; identical to SEQ ID NO: 11964

SEQ ID NO: 11966 - protein, 962 aa, Homo Sapiens
MPRAPHFMPLLLLLLLLSLPHTQAAFPQDPLPLLISDLQGTSPLSWFRGLEDDAVAAELGLDFQRFLTLNRTLLVAARDHVFSFDLQAEEEGEGLVPNKYLTWRSQDVENCAVRGKLTDECYNYIRVLVPWDSQTLLACGTNSFSPVCRSYGITSLQQEGEELSGQARCPFDATQSNVAIFAEGSLYSATAADFQASDAVVYRSLGPQPPLRSAKYDSKWLREPHFVQALEHGDHVYFFFREVSVEDARLGRVQFSRVARVCKRDMGGSPRALDRHWTSFLKLRLNCSVPGDSTFYFDVLQALTGPVNLHGRSALFGVFTTQTNSIPGSAVCAFYLDEIERGFEGKFKEQRSLDGAWTPVSEDRVPSPRPGSCAGVGGAALFSSSRDLPDDVLTFIKAHPLLDPAVPPVTHQPLLTLTSRALLTQVAVDGMAGPHSNITVMFLGSNDGTVLKVLTPGGRSGGPEPILLEEIDAYSPARCSGKRTAQTARRIIGLELDTEGHRLFVAFSGCIVYLPLSRCARHGACQRSCLASQDPYCGWHSSRGCVDIRGSGGTDVDQAGNQESMEHGDCQDGATGSQSGPGDSAYVLPGPGPSPGTPSPPSDAHPRPQSSTLGVHTRGVRRDLPPASASRSVPIPLLLASVAAAFALGASVSGLLVSCACRRAHRRRGKDIETPGLPRPLSLRSLARLHGGGPEPPPPSKDGDAVQTPQLYTTFLPPPEGVPPPELACLPTPESTPELPVKHLRAAGDPWEWNQNRNNAKEGPGRSRGGHAAGGPAPRVLVRPPPPGCPGQAVEVTTLEELLRYLHGPQPPRKGAEPPAPLTSRALPPEPAPALLGGPSPRPHECASPLRLDVPPEGRCASAPARPALSAPAPRLGVGGGRRLPFSGHRAPPALLTRVPSGGPSRYSGGPGKHLLYLGRPEGYRGRALKRVDVEKPQLSLKPPLVGPSSRQAVPNGGRFNF

SEQ ID NO: 11967 - protein, 537 aa, Homo Sapiens [sequence omitted]

SEQ ID NO: 11968 - protein, 537 aa, Homo Sapiens
MPRAPHFMPLLLLLLLLSLPHTQAAFPQDPLPLLISDLQGTSPLSWFRGLEDDAVAAELGLDFQRFLTLNRTLLVAARDHVFSFDLQAEEEGEGLVPNKYLTWRSQDVENCAVRGKLTDECYNYIRVLVPWDSQTLLACGTNSFSPVCRSYGITSLQQEGEELSGQARCPFDATQSNVAIFAEGSLYSATAADFQASDAVVYRSLGPQPPLRSAKYDSKWLREPHFVQALEHGDHVYFFFREVSVEDARLGRVQFSRVARVCKRDMGGSPRALDRHWTSFLKLRLNCSVPGDSTFYFDVLQALTGPVNLHGRSALFGVFTTQTNSIPGSAVCAFYLDEIERGFEGKFKEQRSLDGAWTPVSEDRVPSPRPGSCPAHSSPLGRSLQVLRGSREAPPVPGPARGLPGPRPEKGGRREAPVVPEASPRRALLPPGRPERRPFQLLKGAAHGLQRGERPSPLGHELDALQDVSPPPRPAPPAFPTRRVSRGPFSPRVYLLTVFPPVLDRRVGGEKPVSSVSQHFRGSWRTPTPRSLPAKLP

SEQ ID NO: 11969 - protein, 922 aa, Homo Sapiens
MPRAPHFMPLLLLLLLLSLPHTQAAFPQDPLPLLISDLQGTSPLSWFRGLEDDAVAAELGLDFQRFLTLNRTLLVAARDHVFSFDLQAEEEGEGLVPNKYLTWRSQDVENCAVRGKLTDECYNYIRVLVPWDSQTLLACGTNSFSPVCRSYGITSLQQEGEELSGQARCPFDATQSNVAIFAEPHFVQALEHGDHVYFFFREVSVEDARLGRVQFSRVARVCKRDMGGSPRALDRHWTSFLKLRLNCSVPGDSTFYFDVLQALTGPVNLHGRSALFGVFTTQTNSIPGSAVCAFYLDEIERGFEGKFKEQRSLDGAWTPVSEDRVPSPRPGSCAGVGGAALFSSSRDLPDDVLTFIKAHPLLDPAVPPVTHQPLLTLTSRALLTQVAVDGMAGPHSNITVMFLGSNDGTVLKVLTPGGRSGGPEPILLEEIDAYSPARCSGKRTAQTARRIIGLELDTEGHRLFVAFSGCIVYLPLSRCARHGACQRSCLASQDPYCGWHSSRGCVDIRGSGGTDVDQAGNQESMEHGDCQDGATGSQSGPGDSAYVLPGPGPSPGTPSPPSDAHPRPQSSTLGVHTRGVRRDLPPASASRSVPIPLLLASVAAAFALGASVSGLLVSCACRRAHRRRGKDIETPGLPRPLSLRSLARLHGGGPEPPPPSKDGDAVQTPQLYTTFLPPPEGVPPPELACLPTPESTPELPVKHLRAAGDPWEWNQNRNNAKEGPGRSRGGHAAGGPAPRVLVRPPPPGCPGQAVEVTTLEELLRYLHGPQPPRKGAEPPAPLTSRALPPEPAPALLGGPSPRPHECASPLRLDVPPEGRCASAPARPALSAPAPRLGVGGGRRLPFSGHRAPPALLTRVPSGGPSRYSGGPGKHLLYLGRPEGYRGRALKRVDVEKPQLSLKPPLVGPSSRQAVPNGGRFNF

SEQ ID NO: 11970 - protein, 22 aa, Homo Sapiens
MRVFLLCAYILLLMVSQLRAVS

SEQ ID NO: 11971 - protein, 148 aa, Homo Sapiens
MRVFLLCAYILLLMVSQLRAVSFPEDDEPLNTVDYHYSRQYPVFRGRPSGNESQHRLDFQLMLKIRDTLYIAGRDQVYTVNLNEMPKTEVIPNKKLTWRSRQQDRENCAMKGKHKDECHNFIKVFVPRNDEMVFVCGTNAFNPMCRYY

SEQ ID NO: 11972 - protein, 219 aa, Homo Sapiens
MRVFLLCAYILLLMVSQLRAVSFPEDDEPLNTVDYHYSRQYPVFRGRPSGNESQHRLDFQLMLKIRDTLYIAGRDQVYTVNLNEMPKTEVIPNKKLTWRSRQQDRENCAMKGKHKDECHNFIKVFVPRNDEMVFVCGTNAFNPMCRYYRLSTLEYDGEEISGLARCPFDARQTNVALFADGKLYSATVADFLASDAVIYRSMGDGSALRTIKYDSKWIK

SEQ ID NO: 11973 - protein, 1073 aa, Homo Sapiens
MRVFLLCAYILLLMVSQLRAVSFPEDDEPLNTVDYHYSRQYPVFRGRPSGNESQHRLDFQLMLKIRDTLYIAGRDQVYTVNLNEMPKTEVIPNKKLTWRSRQQDRENCAMKGKHKDECHNFIKVFVPRNDEMVFVCGTNAFNPMCRYYRLSTLEYDGEEISGLARCPFDARQTNVALFADGKLYSATVADFLASDAVIYRSMGDGSALRTIKYDSKWIKEPHFLHAIEYGNYVYFFFREIAVEHNNLGKAVYSRVARICKNDMGGSQRVLEKHWTSFLKARLNCSVPGDSFFYFDVLQSITDIIQINGIPTVVGVFTTQLNSIPGSAVCAFSMDDIEKVFKGRFKEQKTPDSVWTAVPEDKVPKPRPGCCAKHGLAEAYKTSIDFPDETLSFIKSHPLMDSAVPPIADEPWFTKTRVRYRLTAISVDHSAGPYQNYTVIFVGSEAGMVLKVLAKTSPFSLNDSVLLEEIEAYNHAKCSAENEEDKKVISLQLDKDHHALYVAFSSCIIRIPLSRCERYGSCKKSCIASRDPYCGWLSQGSCGRVTPGMLAEGYEQDTEFGNTAHLGDCHEILPTSTTPDYKIFGGPTSDMEVSSSSVTTMASIPEITPKVIDTWRPKLTSSRKFVVQDDPNTSDFTDPLSGIPKGVRWEVQSGESNQMVHMNVLITCVFAAFVLGAFIAGVAVYCYRDMFVRKNRKIHKDAESAQSCTDSSGSFAKLNGLFDSPVKEYQQNIDSPKLYSNLLTSRKELPPNGDTKSMVMDHRGQPPELAALPTPESTPVLHQKTLQAMKSHSEKAHGHGASRKETPQFFPSSPPPHSPLSHGHIPSAIVLPNATHDYNTSFSNSNAHKAEKKLQNIDHPLTKSSSKRDHRRSVDSRNTLNDLLKHLNDPNSNPKAIMGDIQMAHQNLMLDPMGSMSEVPPKVPNREASLYSPPSTLPRNSPTKRVDVPTTPGVPMTSLERQRGYHKNSSQRHSISAMPKNLNSPNGVLLSRQPSMNRGGYMPTPTGAKVDYIQGTPVSVHLQPSLSRQSSYTSNGTLPRTGLKRTPSLKPDVPPKPSFVPQTPSVRPLNKYTY

SEQ ID NO: 11974 - protein, 597 aa, Homo Sapiens
MRVFLLCAYILLLMVSQLRAVSFPEDDEPLNTVDYHYSRQYPVFRGRPSGNESQHRLDFQLMLKIRDTLYIAGRDQVYTVNLNEMPKTEVIPNKKLTWRSRQQDRENCAMKGKHKDECHNFIKVFVPRNDEMVFVCGTNAFNPMCRYYRLSTLEYDGEEISGLARCPFDARQTNVALFADGKLYSATVADFLASDAVIYRSMGDGSALRTIKYDSKWIKEPHFLHAIEYGNYVYFFFREIAVEHNNLGKAVYSRVARICKNDMGGSQRVLEKHWTSFLKARLNCSVPGDSFFYFDVLQSITDIIQINGIPTVVGVFTTQLNSIPGSAVCAFSMDDIEKVFKGRFKEQKTPDSVWTAVPEDKVPKPRPGCCAKHGLAEAYKTSIDFPDETLSFIKSHPLMDSAVPPIADEPWFTKTRVRYRLTAISVDHSAGPYQNYTVIFVGSEAGMVLKVLAKTSPFSLNDSVLLEEIEAYNHAKCSAENEEDKKVISLQLDKDHHALYVAFSSCIIRIPLSRCERYGSCKKSCIASRDPYCGWLSQGSCGRVTPGMLAEGYEQDTEFGNTAHLGDCHDMEVSSSSVTTMVYDGKSSLESPTRWST

SEQ ID NO: 11975 - protein, 1011 aa, Homo Sapiens
MRVFLLCAYILLLMVSQLRAVSFPEDDEPLNTVDYHYSRQYPVFRGRPSGNESQHRLDFQLMLKIRDTLYIAGRDQVYTVNLNEMPKTEVIPNKKLTWRSRQQDRENCAMKGKHKDECHNFIKVFVPRNDEMVFVCGTNAFNPMCRYYRLSTLEYDGEEISGLARCPFDARQTNVALFADGKLYSATVADFLASDAVIYRSMGDGSALRTIKYDSKWIKEPHFLHAIEYGNYVYFFFREIAVEHNNLGKAVYSRVARICKNDMGGSQRVLEKHWTSFLKARLNCSVPGDSFFYFDVLQSITDIIQINGIPTVVGVFTTQLNSIPGSAVCAFSMDDIEKVFKGRFKEQKTPDSVWTAVPEDKVPKPRPGCCAKHGLAEAYKTSIDFPDETLSFIKSHPLMDSAVPPIADEPWFTKTRVRYRLTAISVDHSAGPYQNYTVIFVGSEAGMVLKVLAKTSPFSLNDSVLLEEIEAYNHAKCSAENEEDKKVISLQLDKDHHALYVAFSSCIIRIPLSRCERYGSCKKSCIASRDPYCGWLSQGSCGRVTPGMLLLTEDFFAFHNHSAEGYEQDTEFGNTAHLGDCHGVRWEVQSGESNQMVHMNVLITCVFAAFVLGAFIAGVAVYCYRDMFVRKNRKIHKDAESAQSCTDSSGSFAKLNGLFDSPVKEYQQNIDSPKLYSNLLTSRKELPPNGDTKSMVMDHRGQPPELAALPTPESTPVLHQKTLQAMKSHSEKAHGHGASRKETPQFFPSSPPPHSPLSHGHIPSAIVLPNATHDYNTSFSNSNAHKAEKKLQNIDHPLTKSSSKRDHRRSVDSRNTLNDLLKHLNDPNSNPKAIMGDIQMAHQNLMLDPMGSMSEVPPKVPNREASLYSPPSTLPRNSPTKRVDVPTTPGVPMTSLERQRGYHKNSSQRHSISAMPKNLNSPNGVLLSRQPSMNRGGYMPTPTGAKVDYIQGTPVSVHLQPSLSRQSSYTSNGTLPRTGLKRTPSLKPDVPPKPSFVPQTPSVRPLNKYTY

SEQ ID NO: 11976 - protein, 1017 aa, Homo Sapiens
MRVFLLCAYILLLMVSQLRAVSFPEDDEPLNTVDYHYSRQYPVFRGRPSGNESQHRLDFQLMLKIRDTLYIAGRDQVYTVNLNEMPKTEVIPNKKLTWRSRQQDRENCAMKGKHKDECHNFIKVFVPRNDEMVFVCGTNAFNPMCRYYRLSTLEYDGEEISGLARCPFDARQTNVALFADGKLYSATVADFLASDAVIYRSMGDGSALRTIKYDSKWIKEPHFLHAIEYGNYVYFFFREIAVEHNNLGKAVYSRVARICKNDMGGSQRVLEKHWTSFLKARLNCSVPGDSFFYFDVLQSITDIIQINGIPTVVGVFTTQLNSIPGSAVCAFSMDDIEKVFKGRFKEQKTPDSVWTAVPEDKVPKPRPGCCAKHGLAEAYKTSIDFPDETLSFIKSHPLMDSAVPPIADEPWFTKTRVRYRLTAISVDHSAGPYQNYTVIFVGSEAGMVLKVLAKTSPFSLNDSVLLEEIEAYNHAKCSAENEEDKKVISLQLDKDHHALYVAFSSCIIRIPLSRCERYGSCKKSCIASRDPYCGWLSQGSCGRVTPGMLAEGYEQDTEFGNTAHLGDCHEILPTSTTPDYKIFGGPTSGVRWEVQSGESNQMVHMNVLITCVFAAFVLGAFIAGVAVYCYRDMFVRKNRKIHKDAESAQSCTDSSGSFAKLNGLFDSPVKEYQQNIDSPKLYSNLLTSRKELPPNGDTKSMVMDHRGQPPELAALPTPESTPVLHQKTLQAMKSHSEKAHGHGASRKETPQFFPSSPPPHSPLSHGHIPSAIVLPNATHDYNTSFSNSNAHKAEKKLQNIDHPLTKSSSKRDHRRSVDSRNTLNDLLKHLNDPNSNPKAIMGDIQMAHQNLMLDPMGSMSEVPPKVPNREASLYSPPSTLPRNSPTKRVDVPTTPGVPMTSLERQRGYHKNSSQRHSISAMPKNLNSPNGVLLSRQPSMNRGGYMPTPTGAKVDYIQGTPVSVHLQPSLSRQSSYTSNGTLPRTGLKRTPSLKPDVPPKPSFVPQTPSVRPLNKYTY

SEQ ID NO: 11977 - protein, 476 aa, Homo Sapiens
MRVFLLCAYILLLMVSQLRAVSFPEDDEPLNTVDYHYSRQYPVFRGRPSGNESQHRLDFQLMLKIRDTLYIAGRDQVYTVNLNEMPKTEVIPNKKLTWRSRQQDRENCAMKGKHKDECHNFIKVFVPRNDEMVFVCGTNAFNPMCRYYRLSTLEYDGEEISGLARCPFDARQTNVALFADGKLYSATVADFLASDAVIYRSMGDGSALRTIKYDSKWIKEPHFLHAIEYGNYVYFFFREIAVEHNNLGKAVYSRVARICKNDMGGSQRVLEKHWTSFLKARLNCSVPGDSFFYFDVLQSITDIIQINGIPTVVGVFTTQLNSIPGSAVCAFSMDDIEKVFKGRFKEQKTPDSVWTAVPEDKVPKPRPGCCAKHGLAEAYKTSIDFPDETLSFIKSHPLMDSAVPPIADEPWFTKTRVRYRLTAISVDHSAGPYQNYTVIFVGSEAGMVLKVLAKTSPFSLNDSVLLEEIEAYNHAK

SEQ ID NO: 11978 - protein, 998 aa, Homo Sapiens
MRVFLLCAYILLLMVSQLRAVSFPEDDEPLNTVDYHYSRQYPVFRGRPSGNESQHRLDFQLMLKIRDTLYIAGRDQVYTVNLNEMPKTEVIPNKKLTWRSRQQDRENCAMKGKHKDECHNFIKVFVPRNDEMVFVCGTNAFNPMCRYYRLSTLEYDGEEISGLARCPFDARQTNVALFADGKLYSATVADFLASDAVIYRSMGDGSALRTIKYDSKWIKEPHFLHAIEYGNYVYFFFREIAVEHNNLGKAVYSRVARICKNDMGGSQRVLEKHWTSFLKARLNCSVPGDSFFYFDVLQSITDIIQINGIPTVVGVFTTQLNSIPGSAVCAFSMDDIEKVFKGRFKEQKTPDSVWTAVPEDKVPKPRPGCCAKHGLAEAYKTSIDFPDETLSFIKSHPLMDSAVPPIADEPWFTKTRVRYRLTAISVDHSAGPYQNYTVIFVGSEAGMVLKVLAKTSPFSLNDSVLLEEIEAYNHAKCSAENEEDKKVISLQLDKDHHALYVAFSSCIIRIPLSRCERYGSCKKSCIASRDPYCGWLSQGSCGRVTPGMLAEGYEQDTEFGNTAHLGDCHGVRWEVQSGESNQMVHMNVLITCVFAAFVLGAFIAGVAVYCYRDMFVRKNRKIHKDAESAQSCTDSSGSFAKLNGLFDSPVKEYQQNIDSPKLYSNLLTSRKELPPNGDTKSMVMDHRGQPPELAALPTPESTPVLHQKTLQAMKSHSEKAHGHGASRKETPQFFPSSPPPHSPLSHGHIPSAIVLPNATHDYNTSFSNSNAHKAEKKLQNIDHPLTKSSSKRDHRRSVDSRNTLNDLLKHLNDPNSNPKAIMGDIQMAHQNLMLDPMGSMSEVPPKVPNREASLYSPPSTLPRNSPTKRVDVPTTPGVPMTSLERQRGYHKNSSQRHSISAMPKNLNSPNGVLLSRQPSMNRGGYMPTPTGAKVDYIQGTPVSVHLQPSLSRQSSYTSNGTLPRTGLKRTPSLKPDVPPKPSFVPQTPSVRPLNKYTY

SEQ ID NO: 11979 - protein, 1073 aa, Homo Sapiens; identical to SEQ ID NO: 11973

SEQ ID NO: 11980 - protein, 597 aa, Homo Sapiens; identical to SEQ ID NO: 11974

SEQ ID NO: 11981 - protein, 1011 aa, Homo Sapiens; identical to SEQ ID NO: 11975

SEQ ID NO: 11982 - protein, 54 aa, Homo Sapiens
  misc_feature (1)..(1): Xaa can be any naturally occurring amino acid
XLLTEDFFAFHNHSAEGYEQDTEFGNTAHLGDCHEILPTSTTPDYKIFGGPTSG

SEQ ID NO: 11983 - protein, 198 aa, Homo Sapiens
  misc_feature (1)..(1): Xaa can be any naturally occurring amino acid
XLTEDFFAFHNHSAEGYEQDTEFGNTAHLGDCHEILPTSTTPDYKIFGGPTSDMEVSSSSVTTMASIPEITPKVIDTWRPKLTSSRKFVVQDDPNTSDFTDPLSGIPKGVRWEVQSGESNQMVHMNVLITCVFAAFVLGAFIAGVAVYCYRDMFVRKNRKIHKDAESAQSCTDSSGSFAKLNGLFDSPVKEYQQNIDS

SEQ ID NO: 11984 - protein, 462 aa, Homo Sapiens
MKPNIIFVLSLLLILEKQAAVMGQKGGSKGRLPSEFSQFPHGQKGQHYSGQKGKQQTESKGSFSIQYTYHVDANDHDQSRKSQQYDLNALHKTTKSQRHLGGSQQLLHNKQEGRDHDKSKGHFHRVVIHHKGGKAHRGTQNPSQDQGNSPSGKGISSQYSNTEERLWVHGLSKEQTSVSGAQKGRKQGGSQSSYVLQTEELVANKQQRETKNSHQNKGHYQNVVEVREEHSSKVQTSLCPAHQDKLQHGSKDIFSTQDELLVYNKNQHQTKNLNQDQQHGRKANKISYQSSSTEERRLHYGENGVQKDVSQSSIYSQTEEKAQGKSQKQITIPSQEQEHSQKANKISYQSSSTEERRLHYGENGVQKDVSQRSIYSQTEKLVAGKSQIQAPNPKQEPWHGENAKGESGQSTNREQDLLSHEQKGRHQHGSHGGLDIVIIEQEDDSDRHLAQHLNNDRNPLFT

SEQ ID NO: 11985 - protein, 582 aa, Homo Sapiens
MKSIILFVLSLLLILEKQAAVMGQKGGSKGQLPSGSSQFPHGQKGQHYFGQKDQQHTKSKGSFSIQHTYHVDINDHDWTRKSQQYDLNALHKATKSKQHLGGSQQLLNYKQEGRDHDKSKGHFHMIVIHHKGGQAHHGTQNPSQDQGNSPSGKGLSSQCSNTEKRLWVHGLSKEQASASGAQKGRTQGGSQSSYVLQTEELVVNKQQRETKNSHQNKGHYQNVVDVREEHSSKLQTSLHPAHQDRLQHGPKDIFTTQDELLVYNKNQHQTKNLSQDQEHGRKAHKISYPSSRTEERQLHHGEKSVQKDVSKGSISIQTEEKIHGKSQNQVTIHSQDQEHGHKENKISYQSSSTEERHLNCGEKGIQKGVSKGSISIQTEEQIHGKSQNQVRIPSQAQEYGHKENKISYQSSSTEERRLNSGEKDVQKGVSKGSISIQTEEKIHGKSQNQVTIPSQDQEHGHKENKMSYQSSSTEERRLNYGGKSTQKDVSQSSISFQIEKLVEGKSQIQTPNPNQDQWSGQNAKGKSGQSADSKQDLLSHEQKGRYKQESSESHNIVITEHEVAQDDHLTQQYNEDRNPIST

SEQ ID NO: 11986 - protein, 57 aa, Homo Sapiens
MADTPRDAGLKQAPASRNEKAPVDFGYVGIDSILEQMRRKAMKQGFEFNIMVVERLG

SEQ ID NO: 11987 - protein, 104 aa, Homo Sapiens
MADTPRDAGLKQAPASRNEKAPVDFGYVGIDSILEQMRRKAMKQGFEFNIMVVGQSGLGKSTLINTLFKSKISRKSVQPTSEERIPKTIEIKSITHDIEEKGVR

SEQ ID NO: 11988 - protein, 108 aa, Homo Sapiens
MADTPRDAGLKQAPASRNEKAPVDFGYVGIDSILEQMRRKAMKQGFEFNIMVVGQSGLGKSTLINTLFKSKISRKSVQPTSEERIPKTIEIKSITHDIEEKGVRMKLT

SEQ ID NO: 11989 - protein, 116 aa, Homo Sapiens
MADTPRDAGLKQAPASRNEKAPVDFGYVGIDSILEQMRRKAMKQGFEFNIMVVGQSGLGKSTLINTLFKSKISRKSVQPTSEERIPKTIEIKSITHDIEEKGVRMKLTVIDTPGFG

SEQ ID NO: 11990 - protein, 127 aa, Homo Sapiens
MADTPRDAGLKQAPASRNEKAPVDFGYVGIDSILEQMRRKAMKQGFEFNIMVVGQSGLGKSTLINTLFKSKISRKSVQPTSEERIPKTIEIKSITHDIEEKGVRMKLTVIDTPGFGDHINNENCWQP

SEQ ID NO: 11991 - protein, 135 aa, Homo Sapiens
MADTPRDAGLKQAPASRNEKAPVDFGYVGIDSILEQMRRKAMKQGFEFNIMVVGQSGLGKSTLINTLFKSKISRKSVQPTSEERIPKTIEIKSITHDIEEKGVRMKLTVIDTPGFGDHINNENCWQPIMKFINDQ

SEQ ID NO: 11992 - protein, 144 aa, Homo Sapiens
MADTPRDAGLKQAPASRNEKAPVDFGYVGIDSILEQMRRKAMKQGFEFNIMVVGQSGLGKSTLINTLFKSKISRKSVQPTSEERIPKTIEIKSITHDIEEKGVRMKLTVIDTPGFGDHINNENCWQPIMKFINDQYEKYLQEEV

SEQ ID NO: 11993 - protein, 151 aa, Homo Sapiens
MADTPRDAGLKQAPASRNEKAPVDFGYVGIDSILEQMRRKAMKQGFEFNIMVVGQSGLGKSTLINTLFKSKISRKSVQPTSEERIPKTIEIKSITHDIEEKGVRMKLTVIDTPGFGDHINNENCWQPIMKFINDQYEKYLQEEVNINRKKR

SEQ ID NO: 11994 - protein, 157 aa, Homo Sapiens
MADTPRDAGLKQAPASRNEKAPVDFGYVGIDSILEQMRRKAMKQGFEFNIMVVGQSGLGKSTLINTLFKSKISRKSVQPTSEERIPKTIEIKSITHDIEEKGVRMKLTVIDTPGFGDHINNENCWQPIMKFINDQYEKYLQEEVNINRKKRIPDTRV

SEQ ID NO: 11995 - protein, 165 aa, Homo Sapiens
MADTPRDAGLKQAPASRNEKAPVDFGYVGIDSILEQMRRKAMKQGFEFNIMVVGQSGLGKSTLINTLFKSKISRKSVQPTSEERIPKTIEIKSITHDIEEKGVRMKLTVIDTPGFGDHINNENCWQPIMKFINDQYEKYLQEEVNINRKKRIPDTRVHCCLYFIP

SEQ ID NO: 11996 - protein, 195 aa, Homo Sapiens
MADTPRDAGLKQAPASRNEKAPVDFGYVGIDSILEQMRRKAMKQGFEFNIMVVGQSGLGKSTLINTLFKSKISRKSVQPTSEERIPKTIEIKSITHDIEEKGVRMKLTVIDTPGFGDHINNENCWQPIMKFINDQYEKYLQEEVNINRKKRIPDTRVHCCLYFIPATGHSLRPLDIEFMKRLSKVVNIVPVIAKA

SEQ ID NO: 11997 - protein, 209 aa, Homo Sapiens
MADTPRDAGLKQAPASRNEKAPVDFGYVGIDSILEQMRRKAMKQGFEFNIMVVGQSGLGKSTLINTLFKSKISRKSVQPTSEERIPKTIEIKSITHDIEEKGVRMKLTVIDTPGFGDHINNENCWQPIMKFINDQYEKYLQEEVNINRKKRIPDTRVHCCLYFIPATGHSLRPLDIEFMKRLSKVVNIVPVIAKADTLTLEERVHFKQR

SEQ ID NO: 11998 - protein, 209 aa, Homo Sapiens; identical to SEQ ID NO: 11997

SEQ ID NO: 11999 - protein, 335 aa, Homo Sapiens
MADTPRDAGLKQAPASRNEKAPVDFGYVGIDSILEQMRRKAMKQGFEFNIMVVGQSGLGKSTLINTLFKSKISRKSVQPTSEERIPKTIEIKSITHDIEEKGVRMKLTVIDTPGFGDHINNENCWQPIMKFINDQYEKYLQEEVNINRKKRIPDTRVHCCLYFIPATGHSLRPLDIEFMKRLSKVVNIVPVIAKADTLTLEERVHFKQRITADLLSNGIDVYPQKEFDEDSEDRLVNEKFREMIPFAVVGSDHEYQVNGKRILGRKTKWGTIEVENTTHCEFAYLRDLLIRTHMQNIKDITSSIHFEAYRVKRLNEGSSAMANGMEEKEPEAPEM

SEQ ID NO: 12000 - protein, 335 aa, Homo Sapiens; identical to SEQ ID NO: 11999

SEQ ID NO: 12001 - protein, 335 aa, Homo Sapiens; identical to SEQ ID NO: 11999

SEQ ID NO: 12002 - protein, 362 aa, Homo Sapiens
MAGAGCTGTWSWLWGTATEAAPSCVGDMADTPRDAGLKQAPASRNEKAPVDFGYVGIDSILEQMRRKAMKQGFEFNIMVVGQSGLGKSTLINTLFKSKISRKSVQPTSEERIPKTIEIKSITHDIEEKGVRMKLTVIDTPGFGDHINNENCWQPIMKFINDQYEKYLQEEVNINRKKRIPDTRVHCCLYFIPATGHSLRPLDIEFMKRLSKVVNIVPVIAKADTLTLEERVHFKQRITADLLSNGIDVYPQKEFDEDSEDRLVNEKFREMIPFAVVGSDHEYQVNGKRILGRKTKWGTIEVENTTHCEFAYLRDLLIRTHMQNIKDITSSIHFEAYRVKRLNEGSSAMANGMEEKEPEAPEM

SEQ ID NO: 12003 - protein, 35 aa, Homo Sapiens
MEPPASKVPEVPTAPATDAAPKRVEIQMPKPAEAP

SEQ ID NO: 12004 - protein, 422 aa, Homo Sapiens
MEPPASKVPEVPTAPATDAAPKRVEIQMPKPAEAPTAPSPAQTLENSEPAPVSQLQSRLEPKPQPPVAEATPRSQEATEAAPSCVGDMADTPRDAGLKQAPASRNEKAPVDFGYVGIDSILEQMRRKAMKQGFEFNIMVVGQSGLGKSTLINTLFKSKISRKSVQPTSEERIPKTIEIKSITHDIEEKGVRMKLTVIDTPGFGDHINNENCWQPIMKFINDQYEKYLQEEVNINRKKRIPDTRVHCCLYFIPATGHSLRPLDIEFMKRLSKVVNIVPVIAKADTLTLEERVHFKQRITADLLSNGIDVYPQKEFDEDSEDRLVNEKFREMIPFAVVGSDHEYQVNGKRILGRKTKWGTIEVENTTHCEFAYLRDLLIRTHMQNIKDITSSIHFEAYRVKRLNEGSSAMANGMEEKEPEAPEM

SEQ ID NO: 12005 - protein, 422 aa, Homo Sapiens; identical to SEQ ID NO: 12004

SEQ ID NO: 12006 - protein, 422 aa, Homo Sapiens; identical to SEQ ID NO: 12004

SEQ ID NO: 12007 - protein, 422 aa, Homo Sapiens; identical to SEQ ID NO: 12004

SEQ ID NO: 12008 - protein, 568 aa, Homo Sapiens
MERDRISALKRSFEVEEVETPNSTPPRRVQTPLLRATVASSTQKFQDLGVKNSEPSARHVDSLSQRSPKASLRRVELSGPKAAEPVSRRTELSIDISSKQVENAGAIGPSRFGLKRAEVLGHKTPEPAPRRTEITIVKPQESAHRRMEPPASKVPEVPTAPATDAAPKRVEIQMPKPAEAPTAPSPAQTLENSEPAPVSQLQSRLEPKPQPPVAEATPRSQEATEAAPSCVGDMADTPRDAGLKQAPASRNEKAPVDFGYVGIDSILEQMRRKAMKQGFEFNIMVVGQSGLGKSTLINTLFKSKISRKSVQPTSEERIPKTIEIKSITHDIEEKGVRMKLTVIDTPGFGDHINNENCWQPIMKFINDQYEKYLQEEVNINRKKRIPDTRVHCCLYFIPATGHSLRPLDIEFMKRLSKVVNIVPVIAKADTLTLEERVHFKQRITADLLSNGIDVYPQKEFDEDSEDRLVNEKFREMIPFAVVGSDHEYQVNGKRILGRKTKWGTIEVENTTHCEFAYLRDLLIRTHMQNIKDITSSIHFEAYRVKRLNEGSSAMANGMEEKEPEAPEM

SEQ ID NO: 12009 - protein, 568 aa, Homo Sapiens; identical to SEQ ID NO: 12008

SEQ ID NO: 12010 - protein, 159 aa, Homo Sapiens
MGSFRTSKMPKPAEAPTAPSPAQTLENSEPAPVSQLQSRLEPKPQPPVAEATPRSQEATEAAPSCVGDMADTPRDAGLKQAPASRNEKAPVDFGYVGIDSILEQMRRKAMKQGFEFNIMVVGQSGLGKSTLINTLFKSKISRKSVQPTSEERIPKTIEI

SEQ ID NO: 12011 - protein, 474 aa, Homo Sapiens
MGSSFWEGLQVAVGLPQGCWPQGLDSGEPAEGGQLEAAPVCIVTRQSKETAGPTLGRGGWRQGSLRRGKGTSCRCRQLSPGHGPGRLTGCGECHRLPCRGLVSGFTGLRGQEEDDLAFCLATIGSDRQATEAAPSCVGDMADTPRDAGLKQAPASRNEKAPVDFGYVGIDSILEQMRRKAMKQGFEFNIMVVGQSGLGKSTLINTLFKSKISRKSVQPTSEERIPKTIEIKSITHDIEEKGVRMKLTVIDTPGFGDHINNENCWQPIMKFINDQYEKYLQEEVNINRKKRIPDTRVHCCLYFIPATGHSLRPLDIEFMKRLSKVVNIVPVIAKADTLTLEERVHFKQRITADLLSNGIDVYPQKEFDEDSEDRLVNEKFREMIPFAVVGSDHEYQVNGKRILGRKTKWGTIEVENTTHCEFAYLRDLLIRTHMQNIKDITSSIHFEAYRVKRLNEGSSAMANGMEEKEPEAPEM

SEQ ID NO: 12012 - protein, 23 aa, Homo Sapiens
MHLAAEHCVCDSPPSSWNHPPQV

SEQ ID NO: 12013 - protein, 125 aa, Homo Sapiens
MIICPTRPFTALKRSFEVEEVETPNSTPPRRVQTPLLRATVASSTQKFQDLGVKNSEPSARHVDSLSQRSPKASLRRVELSGPKAAEPVSRRTELSIDISSKQVENAGAIGPSRFGLKRAEVLGH

SEQ ID NO: 12014 - protein, 90 aa, Homo Sapiens
MKDFGSRQEFDSVENAGAIGPSRFGLKRAEVLGHKTPEPAPRRTEITIVKPQESAHRRMEPPASKPEVGAAHLRGAHPQDHRDQVHHARY

SEQ ID NO: 12015 - protein, 134 aa, Homo Sapiens
MKDFGSRQEFDSVENAGAIGPSRFGLKRAEVLGHKTPEPAPRRTEITIVKPQESAHRRMEPPASKVPEVPTAPATDAAPKRVEIQMPKPAEAPTAPSPAQTLENSEPAPVSQLQSRLEPKPQPPVAEATPRSQE

SEQ ID NO: 12016 - protein, 567 aa, Homo Sapiens
MKKSYSALKRSFEVEEVETPNSTPPRRVQTPLLRATVASSTQKFQDLGVKNSEPSARHVDSLSQRSPKASLRRVELSGPKAAEPVSRRTELSIDISSKQVENAGAIGPSRFGLKRAEVLGHKTPEPAPRRTEITIVKPQESAHRRMEPPASKVPEVPTAPATDAAPKRVEIQMPKPAEAPTAPSPAQTLENSEPAPVSQLQSRLEPKPQPPVAEATPRSQEATEAAPSCVGDMADTPRDAGLKQAPASRNEKAPVDFGYVGIDSILEQMRRKAMKQGFEFNIMVVGQSGLGKSTLINTLFKSKISRKSVQPTSEERIPKTIEIKSITHDIEEKGVRMKLTVIDTPGFGDHINNENCWQPIMKFINDQYEKYLQEEVNINRKKRIPDTRVHCCLYFIPATGHSLRPLDIEFMKRLSKVVNIVPVIAKADTLTLEERVHFKQRITADLLSNGIDVYPQKEFDEDSEDRLVNEKFREMIPFAVVGSDHEYQVNGKRILGRKTKWGTIEVENTTHCEFAYLRDLLIRTHMQNIKDITSSIHFEAYRVKRLNEGSSAMANGMEEKEPEAPEM

SEQ ID NO: 12017 - protein, 44 aa, Homo Sapiens
MKKSYSDLLLDPCISNLASLHCARFSGARHRRICSCLVIFDSAR

SEQ ID NO: 12018 - protein, 586 aa, Homo Sapiens
MKKSYSGGTRTSSGRLRRLGDSSGPALKRSFEVEEVETPNSTPPRRVQTPLLRATVASSTQKFQDLGVKNSEPSARHVDSLSQRSPKASLRRVELSGPKAAEPVSRRTELSIDISSKQVENAGAIGPSRFGLKRAEVLGHKTPEPAPRRTEITIVKPQESAHRRMEPPASKVPEVPTAPATDAAPKRVEIQMPKPAEAPTAPSPAQTLENSEPAPVSQLQSRLEPKPQPPVAEATPRSQEATEAAPSCVGDMADTPRDAGLKQAPASRNEKAPVDFGYVGIDSILEQMRRKAMKQGFEFNIMVVGQSGLGKSTLINTLFKSKISRKSVQPTSEERIPKTIEIKSITHDIEEKGVRMKLTVIDTPGFGDHINNENCWQPIMKFINDQYEKYLQEEVNINRKKRIPDTRVHCCLYFIPATGHSLRPLDIEFMKRLSKVVNIVPVIAKADTLTLEERVHFKQRITADLLSNGIDVYPQKEFDEDSEDRLVNEKFREMIPFAVVGSDHEYQVNGKRILGRKTKWGTIEVENTTHCEFAYLRDLLIRTHMQNIKDITSSIHFEAYRVKRLNEGSSAMANGMEEKEPEAPEM

SEQ ID NO: 12019 - protein, 151 aa, Homo Sapiens
MLWPEEEPWGGRCACVTEACPADAGPLTSRRGSLKRSFEVEEVETPNSTPPRRVQTPLLRATVASSTQKFQDLGVKNSEPSARHVDSLSQRSPKASLRRVELSGPKAAEPVSRRTELSIDISSKQVENAGAIGPSRFGLKRAEVLGHKTPE

SEQ ID NO: 12020 - protein, 189 aa, Homo Sapiens
MPKPAEAPTAPSPAQTLENSEPAPVSQLQSRLEPKPQPPVAEATPRSQEATEAAPSCVGDMADTPRDAGLKQAPASRNEKAPVDFGYVGIDSILEQMRRKAMKQGFEFNIMVVGESSPCMPLNQCRKPASAPRAAHKPLGLVFPSVKWGSNPDLKDGLPVTLRVHACAWEEPTASSGSSEGPVLHIQGP

SEQ ID NO: 12021 - protein, 579 aa, Homo Sapiens
MSDPAVNAQLDGIISDFEALKRSFEVEEVETPNSTPPRRVQTPLLRATVASSTQKFQDLGVKNSEPSARHVDSLSQRSPKASLRRVELSGPKAAEPVSRRTELSIDISSKQVENAGAIGPSRFGLKRAEVLGHKTPEPAPRRTEITIVKPQESAHRRMEPPASKVPEVPTAPATDAAPKRVEIQMPKPAEAPTAPSPAQTLENSEPAPVSQLQSRLEPKPQPPVAEATPRSQEATEAAPSCVGDMADTPRDAGLKQAPASRNEKAPVDFGYVGIDSILEQMRRKAMKQGFEFNIMVVGQSGLGKSTLINTLFKSKISRKSVQPTSEERIPKTIEIKSITHDIEEKGVRMKLTVIDTPGFGDHINNENCWQPIMKFINDQYEKYLQEEVNINRKKRIPDTRVHCCLYFIPATGHSLRPLDIEFMKRLSKVVNIVPVIAKADTLTLEERVHFKQRITADLLSNGIDVYPQKEFDEDSEDRLVNEKFREMIPFAVVGSDHEYQVNGKRILGRKTKWGTIEVENTTHCEFAYLRDLLIRTHMQNIKDITSSIHFEAYRVKRLNEGSSAMANGMEEKEPEAPEM

SEQ ID NO: 12022 - protein, 152 aa, Homo Sapiens
MTSMSAGTINTLKRSFEVEEVETPNSTPPRRVQTPLLRATVASSTQKFQDLGVKNSEPSARHVDSLSQRSPKASLRRVELSGPKAAEPVSRRTELSIDISSKQVENAGAIGPSRFGLKRAEVLGHKTPEPAPRRTEITIVKPQESAHRRMEP

SEQ ID NO: 12023 - protein, 105 aa, Homo Sapiens
MLSLGTKADTHDEILEGLNFNLTEIPEAQIHEGFQELLRTLNQPDSQLQLTTGNGLFLSEGLKLVDKFLEDVKKLYHSEAFTVNFGDTEEAKKQINDYVEKGTQG

SEQ ID NO: 12024 - protein, 22 aa, Homo Sapiens
MPSSVSWGILLLAGLCCLVPVS

SEQ ID NO: 12025 - protein, 92 aa, Homo Sapiens
MPSSVSWGILLLAGLCCLVPVSLAEDPQGDAAQKTDTSHHDQDHPTFNKITPNLAEFAFSLYRQLAHQSNSTNIFFSPVSIATAFAMLSLGT

SEQ ID NO: 12026 - protein, 117 aa, Homo Sapiens
MPSSVSWGILLLAGLCCLVPVSLAEDPQGDAAQKTDTSHHDQDHPTFNKITPNLAEFAFSLYRQLAHQSNSTNIFFSPVSIATAFAMLSLGTKADTHDEILEGLNFNLTEIPEAQIH

SEQ ID NO: 12027 - protein, 144 aa, Homo Sapiens
MPSSVSWGILLLAGLCCLVPVSLAEDPQGDAAQKTDTSHHDQDHPTFNKITPNLAEFAFSLYRQLAHQSNSTNIFFSPVSIATAFAMLSLGTKADTHDEILEGLNFNLTEIPEAQIHEGFQELLRTLNQPDSQLQLTTGNGLFL

SEQ ID NO: 12028 - protein, 156 aa, Homo Sapiens
MPSSVSWGILLLAGLCCLVPVSLAEDPQGDAAQKTDTSHHDQDHPTFNKITPNLAEFAFSLYRQLAHQSNSTNIFFSPVSIATAFAMLSLGTKADTHDEILEGLNFNLTEIPEAQIHEGFQELLRTLNQPDSQLQLTTGNGLFLSEGLKLVDKFLE

SEQ ID NO: 12029 - protein, 418 aa, Homo Sapiens
MPSSVSWGILLLAGLCCLVPVSLAEDPQGDAAQKTDTSHHDQDHPTFNKITPNLAEFAFSLYRQLAHQSNSTNIFFSPVSIATAFAMLSLGTKADTHDEILEGLNFNLTEIPEAQIHEGFQELLRTLNQPDSQLQLTTGNGLFLSEGLKLVDKFLEDVKKLYHSEAFTVNFGDTEEAKKQINDYVEKGTQGKIVDLVKELDRDTVFALVNYIFFKGKWERPFEVKDTEEEDFHVDQVTTVKVPMMKRLGMFNIQHCKKLSSWVLLMKYLGNATAIFFLPDEGKLQHLENELTHDIITKFLENEDRRSASLHLPKLSITGTYDLKSVLGQLGITKVFSNGADLSGVTEEAPLKLSKAVHKAVLTIDEKGTEAAGAMFLEAIPMSIPPEVKFNKPFVFLMIEQNTKSPLFMGKVVNPTQK

SEQ ID NO: 12030 - protein, 418 aa, Homo Sapiens; identical to SEQ ID NO: 12029

SEQ ID NO: 12031 - protein, 359 aa, Homo Sapiens
MPSSVSWGILLLAGLCCLVPVSLAEDPQGDAAQKTDTSHHDQDHPTFNKITPNLAEFAFSLYRQLAHQSNSTNIFFSPVSIATAFAMLSLGTKADTHDEILEGLNFNLTEIPEAQIHEGFQELLRTLNQPDSQLQLTTGNGLFLSEGLKLVDKFLEDVKKLYHSEAFTVNFGDTEEAKKQINDYVEKGTQGKIVDLVKELDRDTVFALVNYIFFKGKWERPFEVKDTEEEDFHVDQVTTVKVPMMKRLGMFNIQHCKKLSSWVLLMKYLGNATAIFFLPDEGKLQHLENELTHDIITKFLENEDRRSASLHLPKLSITGTYDLKSVLGQLGITKVFSNGADLSGVTEEAPLKLSKVRSP

SEQ ID NO: 12032 - protein, 418 aa, Homo Sapiens; identical to SEQ ID NO: 12029

SEQ ID NO: 12033 - protein, 418 aa, Homo Sapiens; identical to SEQ ID NO: 12029

SEQ ID NO: 12034 - protein, 418 aa, Homo Sapiens; identical to SEQ ID NO: 12029

SEQ ID NO: 12035 - protein, 418 aa, Homo Sapiens; identical to SEQ ID NO: 12029

SEQ ID NO: 12036 - protein, 418 aa, Homo Sapiens; identical to SEQ ID NO: 12029

SEQ ID NO: 12037 - protein, 418 aa, Homo Sapiens; identical to SEQ ID NO: 12029

SEQ ID NO: 12038 - protein, 306 aa, Homo Sapiens
MPSSVSWGILLLAGLCCLVPVSLAEDPQGDAAQKTDTSHHDQDHPTFNKITPNLAEFAFSLYRQLAHQSNSTNIFFSPVSIATAFAMLSLGTKADTHDEILEGLNFNLTEIPEAQIHEGFQELLRTLNQPDSQLQLTTGNGLFLSEGLKLVDKFLEDVKKLYHSEAFTVNFGDTEEAKKQINDYVEKGTQGKIVDLVKELDRDTVFALVNYIFFKGKWERPFEVKDTEEEDFHVDQVTTVKVPMMKRLGMFNIQHCKKLSSWVLLMKYLGNATAIFFLPDEGKLQHLENELTHDIITKFLENEDRR

SEQ ID NO: 12039 - protein, 418 aa, Homo Sapiens; identical to SEQ ID NO: 12029

SEQ ID NO: 12040 - protein, 444 aa, Homo Sapiens
MKVVPSLLLSVLLAQVWLVPGLAPSPQSPETPAPQNQTSRVVQAPKEEEEDEQEASEEKASEEEKAWLMASRQQLAKETSNFGFSLLRKISMRHDGNMVFSPFGMSLAMTGLMLGATGPTETQIKRGLHLQALKPTKPGLLPSLFKGLRETLSRNLELGLTQGSFAFIHKDFDVKETFFNLSKRYFDTECVPMNFRNASQAKRLMNHYINKETRGKIPKLFDEINPETKLILVDYILFKGKWLTPFDPVFTEVDTFHLDKYKTIKVPMMYGAGKFASTFDKNFRCHVLKLPYQGNATMLVVLMEKMGDHLALEDYLTTDLVETWLRNMKTRNMEVFFPKFKLDQKYEMHELLRQMGIRRIFSPFADLSELSATGRNLQVSRVLQRTVIEVDERGTEAVAGILSEITAYSMPPVIKVDRPFHFMIYEETSGMLLFLGRVVNPTLL

SEQ ID NO: 12041 - protein, 444 aa, Homo Sapiens; identical to SEQ ID NO: 12040

SEQ ID NO: 12042 - protein, 444 aa, Homo Sapiens; identical to SEQ ID NO: 12040

SEQ ID NO: 12043 - protein, 484 aa, Homo Sapiens
MSRSTQELLGYHCRLQDKLQEQEGSLAAEGRHSLASAADHMKVVPSLLLSVLLAQVWLVPGLAPSPQSPETPAPQNQTSRVVQAPKEEEEDEQEASEEKASEEEKAWLMASRQQLAKETSNFGFSLLRKISMRHDGNMVFSPFGMSLAMTGLMLGATGPTETQIKRGLHLQALKPTKPGLLPSLFKGLRETLSRNLELGLTQGSFAFIHKDFDVKETFFNLSKRYFDTECVPMNFRNASQAKRLMNHYINKETRGKIPKLFDEINPETKLILVDYILFKGKWLTPFDPVFTEVDTFHLDKYKTIKVPMMYGAGKFASTFDKNFRCHVLKLPYQGNATMLVVLMEKMGDHLALEDYLTTDLVETWLRNMKTRNMEVFFPKFKLDQKYEMHELLRQMGIRRIFSPFADLSELSATGRNLQVSRVLQRTVIEVDERGTEAVAGILSEITAYSMPPVIKVDRPFHFMIYEETSGMLLFLGRVVNPTLL

SEQ ID NO: 12044 - protein, 422 aa, Homo Sapiens
MGPAWLWLLGTGILASVHCQPLLAHGDKSLQGPQPPRHQLSEPAPAYHRITPTITNFALRLYKELAADAPGNIFFSPVSISTTLALLSLGAQANTSALILEGLGFNLTETPEADIHQGFRSLLHTLALPSPKLELKVGNSLFLDKRLKPRQHYLDSIKELYGAFAFSANFTDSVTTGRQINDYLRRQTYGQVVDCLPEFSQDTFMVLANYIFFKAKWKHPFSRYQTQKQESFFVDERTSLQVPMMHQKEMHRFLYDQDLACTVLQIEYRGNALALLVLPDPGKMKQVEAALQPQTLRKWGQLLLPSLLDLHLPRFSISGTYNLEDILPQIGLTNILNLEADFSGVTGQLNKTISKVSHKAMVDMSEKGTEAGAASGLLSQPPSLNTMSDPHAHFNRPFLLLLWEVTTQSLLFLGKVVNPVAG

SEQ ID NO: 12045 - protein, 414 aa, Homo Sapiens
MNPTLGLAIFLAVLLTVKGLLKPSFSPRNYKALSEVQGWKQRMAAKELARQNMDLGFKLLKKLAFYNPGRNIFLSPLSISTAFSMLCLGAQDSTLDEIKQGFNFRKMPEKDLHEGFHYIIHELTQKTQDLKLSIGNTLFIDQRLQPQRKFLEDAKNFYSAETILTNFQNLEMAQKQINDFISQKTHGKINNLIENIDPGTVMLLANYIFFRARWKHEFDPNVTKEEDFFLEKNSSVKVPMMFRSGIYQVGYDDKLSCTILEIPYQKNITAIFILPDEGKLKHLEKGLQVDTFSRWKTLLSRRVVDVSVPRLHMTGTFDLKKTLSYIGVSKIFEEHGDLTKIAPHRSLKVGEAVHKAELKMDERGTEGAAGTGAQTLPMETPLVVKIDKPYLLLIYSEKIPSVLFLGKIVNPIGK

SEQ ID NO: 12046 - protein, 414 aa, Homo Sapiens; identical to SEQ ID NO: 12045

SEQ ID NO: 12047 - protein, 423 aa, Homo Sapiens
MERMLPLLALGLLAAGFCPAVLCHPNSPLDEENLTQENQDRGTHVDLGLASANVDFAFSLYKQLVLKAPDKNVIFSPLSISTALAFLSLGAHNTTLTEILKGLKFNLTETSEAEIHQSFQHLLRTLNQSSDELQLSMGNAMFVKEQLSLLDRFTEDAKRLYGSEAFATDFQDSAAAKKLINDYVKNGTRGKITDLIKDLDSQTMMVLVNYIFFKAKWEMPFDPQDTHQSRFYLSKKKWVMVPMMSLHHLTIPYFRDEELSCTVVELKYTGNASALFILPDQDKMEEVEAMLLPETLKRWRDSLEFREIGELYLPKFSISRDYNLNDILLQLGIEEAFTSKADLSGITGARNLAVSQVVHKAVLDVFEEGTEASAATAVKITLLSALVETRTIVRFNRPFLMIIVPTDTQNIFFMSKVTNPKQA

SEQ ID NO: 12048 - protein, 423 aa, Homo Sapiens; identical to SEQ ID NO: 12047

SEQ ID NO: 12049 - protein, 423 aa, Homo Sapiens; identical to SEQ ID NO: 12047

SEQ ID NO: 12050 - protein, 305 aa, Homo Sapiens
MERMLPLLALGLLAAGFCPAVLCHPNSPLDEENLTQENQDRGTHVDLGLASANVDFAFSLYKQLVLKAPDKNVIFSPLSISTALAFLSLGAHNTTLTEILKGLKFNLTETSEAEIHQSFQHLLRTLNQSSDELQLSMGNAMFVKEQLSLLDRFTEDAKRLYGSEAFATDFQDSAAAKKLINDYVKNGTRGKITDLIKDLDSQTMMVLVNYIFFKAKWEMPFDPQDTHQSRFYLSKKKWVMVPMMSLHHLTIPYFRDEELSCTVVELKYTGNASALFILPDQDKMEEVEAMLLPETLKRWRDSLEF

SEQ ID NO: 12051 - protein, 216 aa, Homo Sapiens
MERMLPLLALGLLAAGFCPAVLCHPNSPLDEENLTQENQDRGTHVDLGLASANVDFAFSLYKQLVLKAPDKNVIFSPLSISTALAFLSLGAHNTTLTEILKGLKFNLTETSEAEIHQSFQHLLRTLNQSSDELQLSMGNAMFVKEQLSLLDRFTEDAKRLYGSEAFATDFQDSAAAKKLINDYVKNGTRGKITDLIKDLDSQTMMVLVNYIFFKER

SEQ ID NO: 12052 - protein, 205 aa, Homo Sapiens
MPFDPQDTHQSRFYLSKKKWVMVPMMSLHHLTIPYFRDEELSCTVVELKYTGNASALFILPDQDKMEEVEAMLLPETLKRWRDSLEFREIGELYLPKFSISRDYNLNDILLQLGIEEAFTSKADLSGITGARNLAVSQVVHKAVLDVFEEGTEASAATAVKITLLSALVETRTIVRFNRPFLMIIVPTDTQNIFFMSKVTNPKQA

SEQ ID NO: 12053 - protein, 46 aa, Homo Sapiens
  misc_feature (1)..(1): Xaa can be any naturally occurring amino acid
XTVVELKYTGNASALFILPDQDKMEEVEAMLLPETLKRWRDSLEFR

SEQ ID NO: 12054 - protein, 427 aa, Homo Sapiens
MHLIDYLLLLLVGLLALSHGQLHVEHDGESCSNSSHQQILETGEGSPSLKIAPANADFAFRFYYLIASETPGKNIFFSPLSISAAYAMLSLGACSHSRSQILEGLGFNLTELSESDVHRGFQHLLHTLNLPGHGLETRVGSALFLSHNLKFLAKFLNDTMAVYEAKLFHTNFYDTVGTIQLINDHVKKETRGKIVDLVSELKKDVLMVLVNYIYFKALWEKPFISSRTTPKDFYVDENTTVRVPMMLQDQEHHWYLHDRYLPCSVLRMDYKGDATVFFILPNQGKMREIEEVLTPEMLMRWNNLLRKRNFYKKLELHLPKFSISGSYVLDQILPRLGFTDLFSKWADLSGITKQQKLEASKSFHKATLDVDEAGTEAAAATSFAIKFFSAQTNRHILRFNRPFLVVIFSTSTQSVLFLGKVVDPTKP

SEQ ID NO: 12055 - protein, 427 aa, Homo Sapiens; identical to SEQ ID NO: 12054

SEQ ID NO: 12056 - protein, 427 aa, Homo Sapiens; identical to SEQ ID NO: 12054

SEQ ID NO: 12057 - protein, 24 aa, Homo Sapiens
MQLFLLLCLVLLSPQGASLHRHHP

SEQ ID NO: 12058 - protein, 86 aa, Homo Sapiens
MQLFLLLCLVLLSPQGASLHRHHPREMKKRVEDLHVGATVAPSSRRDFTFDLYRALASAAPSQSIFFSPVSISMSLAMLSLGAGSS

SEQ ID NO: 12059 - protein, 90 aa, Homo Sapiens
MQLFLLLCLVLLSPQGASLHRHHPREMKKRVEDLHVGATVAPSSRRDFTFDLYRALASAAPSQSIFFSPVSISMSLAMLSLGAGSSTKMQ

SEQ ID NO: 12060 - protein, 144 aa, Homo Sapiens
MQLFLLLCLVLLSPQGASLHRHHPREMKKRVEDLHVGATVAPSSRRDFTFDLYRALASAAPSQSIFFSPVSISMSLAMLSLGAGSSTKMQILEGLGLNLQKSSEKELHRGFQQLLQELNQPRDGFQLSLGNALFTDLVVDLQDT

SEQ ID NO: 12061 - protein, 157 aa, Homo Sapiens
MQLFLLLCLVLLSPQGASLHRHHPREMKKRVEDLHVGATVAPSSRRDFTFDLYRALASAAPSQSIFFSPVSISMSLAMLSLGAGSSTKMQILEGLGLNLQKSSEKELHRGFQQLLQELNQPRDGFQLSLGNALFTDLVVDLQDTFVSAMKTLYLADT

SEQ ID NO: 12062 - protein, 172 aa, Homo Sapiens
MQLFLLLCLVLLSPQGASLHRHHPREMKKRVEDLHVGATVAPSSRRDFTFDLYRALASAAPSQSIFFSPVSISMSLAMLSLGAGSSTKMQILEGLGLNLQKSSEKELHRGFQQLLQELNQPRDGFQLSLGNALFTDLVVDLQDTFVSAMKTLYLADTFPTNFRDSAGAMKQI

SEQ ID NO: 12063 - protein, 231 aa, Homo Sapiens
MQLFLLLCLVLLSPQGASLHRHHPREMKKRVEDLHVGATVAPSSRRDFTFDLYRALASAAPSQSIFFSPVSISMSLAMLSLGAGSSTKMQILEGLGLNLQKSSEKELHRGFQQLLQELNQPRDGFQLSLGNALFTDLVVDLQDTFVSAMKTLYLADTFPTNFRDSAGAMKQINDYVAKQTKGKIVDLLKNLDSNAVVIMVNYIFFKAKWETSFNHKGTQEQDFYVTSETVV

SEQ ID NO: 12064 - protein, 406 aa, Homo Sapiens
MQLFLLLCLVLLSPQGASLHRHHPREMKKRVEDLHVGATVAPSSRRDFTFDLYRALASAAPSQSIFFSPVSISMSLAMLSLGAGSSTKMQILEGLGLNLQKSSEKELHRGFQQLLQELNQPRDGFQLSLGNALFTDLVVDLQDTFVSAMKTLYLADTFPTNFRDSAGAMKQINDYVAKQTKGKIVDLLKNLDSNAVVIMVNYIFFKAKWETSFNHKGTQEQDFYVTSETVVRVPMMSREDQYHYLLDRNLSCRVVGVPYQGNATALFILPSEGKMQQVENGLSEKTLRKWLKMFKKRQLELYLPKFSIEGSYQLEKVLPSLGISNVFTSHADLSGISNHSNIQVSEMVHKAVVEVDESGTRAAAATGTIFTFRSARLNSQRLVFNRPFLMFIVDNNILFLGKVNRP

SEQ ID NO: 12065 - protein, 406 aa, Homo Sapiens; identical to SEQ ID NO: 12064

SEQ ID NO: 12066 - protein, 406 aa, Homo Sapiens; identical to SEQ ID NO: 12064

SEQ ID NO: 12067 - protein, 406 aa, Homo Sapiens; identical to SEQ ID NO: 12064

SEQ ID NO: 12068 - protein, 301 aa, Homo Sapiens
MQLFLLLCLVLLSPQGASLHRHHPREMKKRVEDLHVGATVAPSSRRDFTFDLYRALASAAPSQSIFFSPVSISMSLAMLSLGAGSSTKMQILEGLGLNLQKSSEKELHRGFQQLLQELNQPRDGFQLSLGNALFTDLVVDLQDTFVSAMKTLYLADTFPTNFRDSAGAMKQINDYVAKQTKGKIVDLLKNLDSNAVVIMVNYIFFKAKWETSFNHKGTQEQDFYVTSETVVRVPMMSREDQYHYLLDRNLSCRVVGVPYQGNATALFILPSEGKMQQVENGLSEKTLRKWLKMFKKRYFQT

SEQ ID NO: 12069 - protein, 136 aa, Homo Sapiens
MPLLLYTCLLWLPTSGLWTVQAMDPNAAYVNMSNHHRGLASANVDFAFSLYKHLVALSPKKNIFISPVSISMALAMLSLGTCGHTRAQLLQGLGFNLTERSETEIHQGFQHLHQLFAKSDTSLEMTMGNALFLDGS

SEQ ID NO: 12070 - protein, 278 aa, Homo Sapiens
MPLLLYTCLLWLPTSGLWTVQAMDPNAAYVNMSNHHRGLASANVDFAFSLYKHLVALSPKKNIFISPVSISMALAMLSLGTCGHTRAQLLQGLGFNLTERSETEIHQGFQHLHQLFAKSDTSLEMTMGNALFLDGSLELLESFSADIKHYYESEVLAMNFQDWATASRQINSYVKNKTQGKIVDLFSGLDSPAILVLVNYIFFKGIPTHPHLKAHPLWPGITAAKIQGTLLGKVFDSVKHIHIWESPSSPQSCWAHGHSPLTWQAPGRRTSMWTRQLW

SEQ ID NO: 12071 - protein, 405 aa, Homo Sapiens
MPLLLYTCLLWLPTSGLWTVQAMDPNAAYVNMSNHHRGLASANVDFAFSLYKHLVALSPKKNIFISPVSISMALAMLSLGTCGHTRAQLLQGLGFNLTERSETEIHQGFQHLHQLFAKSDTSLEMTMGNALFLDGSLELLESFSADIKHYYESEVLAMNFQDWATASRQINSYVKNKTQGKIVDLFSGLDSPAILVLVNYIFFKGTWTQPFDLASTREENFYVDETTVVKVPMMLQSSTISYLHDSELPCQLVQMNYVGNGTVFFILPDKGKMNTVIAALSRDTINRWSAGLTSSQVDLYIPKVTISGVYDLGDVLEEMGIADLFTNQANFSRITQDAQLKSSKVVHKAVLQLNEEGVDTAGSTGVTLNLTSKPIILRFNQPFIIMIFDHFTWSSLFLARVMNPV

SEQ ID NO: 12072 - protein, 415 aa, Homo Sapiens
MSPFLYLVLLVLGLHATIHCASPEGKVTACHSSQPNATLYKMSSINADFAFNLYRRFTVETPDKNIFFSPVSISAALVMLSFGACCSTQTEIVETLGFNLTDTPMVEIQHGFQHLICSLNFPKKELELQIGNALFIGKHLKPLAKFLNDVKTLYETEVFSTDFSNISAAKQEINSHVEMQTKGKVVGLIQDLKPNTIMVLVNYIHFKAQWANPFDPSKTEDSSSFLIDKTTTVQVPMMHQMEQYYHLVDMELNCTVLQMDYSKNALALFVLPKEGQMESVEAAMSSKTLKKWNRLLQKGWVDLFVPKFSISATYDLGATLLKMGIQHAYSENADFSGLTEDNGLKLSNAAHKAVLHIGEKGTEAAAVPEVELSDQPENTFLHPIIQIDRSFMLLILERSTRSILFLGKVVNPTEA

SEQ ID NO: 12073 - protein, 415 aa, Homo Sapiens; identical to SEQ ID NO: 12072

SEQ ID NO: 12074 - protein, 417 aa, Homo Sapiens
MASYLYGVLFAVGLCAPIYCVSPANAPSAYPRPSSTKSTPASQVYSLNTDFAFRLYRRLVLETPSQNIFFSPVSVSTSLAMLSLGAHSVTKTQILQGLGFNLTHTPESAIHQGFQHLVHSLTVPSKDLTLKMGSALFVKKELQLQANFLGNVKRLYEAEVFSTDFSNPSIAQARINSHVKKKTQGKVVDIIQGLDLLTAMVLVNHIFFKAKWEKPFHPEYTRKNFPFLVGEQVTVHVPMMHQKEQFAFGVDTELNCFVLQMDYKGDAVAFFVLPSKGKMRQLEQALSARTLRKWSHSLQKRWIEVFIPRFSISASYNLETILPKMGIQNVFDKNADFSGIAKRDSLQVSKATHKAVLDVSEEGTEATAATTTKFIVRSKDGPSYFTVSFNRTFLMMITNKATDGILFLGKVENPTKS

SEQ ID NO: 12075 - protein, 286 aa, Homo Sapiens
MGSALFVKKELQLQANFLGNVKRLYEAEVFSTDFSNPSIAQARINSHVKKKTQGKVVDIIQGLDLLTAMVLVNHIFFKAKWEKPFHPEYTRKNFPFLVGEQVTVHVPMMHQKEQFAFGVDTELNCFVLQMDYKGDAVAFFVLPSKGKMRQLEQALSARTLRKWSHSLQKRWIEVFIPRFSISASYNLETILPKMGIQNVFDKNADFSGIAKRDSLQVSKATHKAVLDVSEEGTEATAATTTKFIVRSKDGPSYFTVSFNRTFLMMITNKATDGILFLGKVENPTKS

SEQ ID NO: 12076 - protein, 337 aa, Homo Sapiens
MLSLGAHSVTKTQILQGLGFNLTHTPESAIHQGFQHLVHSLTVPSKDLTLKMGSALFVKKELQLQANFLGNVKRLYEAEVFSTDFSNPSIAQARINSHVKKKTQGKVVDIIQGLDLLTAMVLVNHIFFKAKWEKPFHPEYTRKNFPFLVGEQVTVHVPMMHQKEQFAFGVDTELNCFVLQMDYKGDAVAFFVLPSKGKMRQLEQALSARTLRKWSHSLQKRWIEVFIPRFSISASYNLETILPKMGIQNVFDKNADFSGIAKRDSLQVSKATHKAVLDVSEEGTEATAATTTKFIVRSKDGPSYFTVSFNRTFLMMITNKATDGILFLGKVENPTKS

SEQ ID NO: 12077 - protein, 335 aa, Homo Sapiens
MQGQGRRRGTCKDIFCSKMASYLYGVLFAVGLCAPIYCVSPANAPSAYPRPSSTKSTPASQVYSLNTDFAFRLYRRLVLETPSQNIFFSPARINSHVKKKTQGKVVDIIQGLDLLTAMVLVNHIFFKAKWEKPFHPEYTRKNFPFLVGEQVTVHVPMMHQKEQFAFGVDTELNCFVLQMDYKGDAVAFFVLPSKGKMRQLEQALSARTLRKWSHSLQKRWIEVFIPRFSISASYNLETILPKMGIQNVFDKNADFSGIAKRDSLQVSKATHKAVLDVSEEGTEATAATTTKFIVRSKDGPSYFTVSFNRTFLMMITNKATDGILFLGKVENPTKS

SEQ ID NO: 12078 - protein, 435 aa, Homo Sapiens
MQGQGRRRGTCKDIFCSKMASYLYGVLFAVGLCAPIYCVSPANAPSAYPRPSSTKSTPASQVYSLNTDFAFRLYRRLVLETPSQNIFFSPVSVSTSLAMLSLGAHSVTKTQILQGLGFNLTHTPESAIHQGFQHLVHSLTVPSKDLTLKMGSALFVKKELQLQANFLGNVKRLYEAEVFSTDFSNPSIAQARINSHVKKKTQGKVVDIIQGLDLLTAMVLVNHIFFKAKWEKPFHPEYTRKNFPFLVGEQVTVHVPMMHQKEQFAFGVDTELNCFVLQMDYKGDAVAFFVLPSKGKMRQLEQALSARTLRKWSHSLQKRWIEVFIPRFSISASYNLETILPKMGIQNVFDKNADFSGIAKRDSLQVSKATHKAVLDVSEEGTEATAATTTKFIVRSKDGPSYFTVSFNRTFLMMITNKATDGILFLGKVENPTKS

SEQ ID NO: 12079 - protein, 201 aa, Homo Sapiens
MRSAGGRGEIKVRRELQPSKQVSGLTNHARTGQEKRNLQRHILFQNGILPLWSTLCCWPLCSNLLCVPGQCPQCIPPPFLHKEHPCLTGVFPQHRLCLPPIPQAGFGDPESEHLLLPCECLHFPGHALPWGPLSHQDPDSPGPGLQPHTHTRVCHPPGLPAPGSLTDCSQQRPDLEDGKCPLRQEGAAAAGKFLGQCQEAV

SEQ ID NO: 12080 - protein, 334 aa, Homo Sapiens
MRSAGGRGEIKVRRELQPSKQVSGLTNHARTGQEKRNLQRLVLETPSQNIFFSPVSVSTSLAMLSLGAHSVTKTQILQGLGFNLTHTPESAIHQGFQHLVHSLTVPSKDLTLKMGSALFVKKELQLQANFLGNVKRLYEAEVFSTDFSNPSIAQARINSHVKKKTQGKVVDIIQGLDLLTAMVLVNHIFFKAKWEKPFHPEYTRKNFPFLVGEQVTVHVPMMHQKEQFAFGVDTELNCFVLQMDYKGDAVAFFVLPSKGKMRQLEQALSARTLRKWSHSLQKRWIEVFIPRFSISASYNLETILPKMGIQNVFDKNADFSGIAKRDSLQVSKVS

SEQ ID NO: 12081 - protein, 113 aa, Homo Sapiens
MEDLCVANTLFALNLFKHLAKASPTQNLFLSPWSISSTMAMVYMGSRGSTEDQMAKVLQFNEVGANAVTPMTPENFTSCGFMQQIQKGSYPDAILQAQAADKIHSSFRSLSSA

SEQ ID NO: 12082 - protein, 132 aa, Homo Sapiens
MEDLCVANTLFALNLFKHLAKASPTQNLFLSPWSISSTMAMVYMGSRGSTEDQMAKVLQFNEVGANAVTPMTPENFTSCGFMQQIQKGSYPDAILQAQAADKIHSSFRSLSSAINASTGNYLLESVNKLFGE

SEQ ID NO: 12083 - protein, 161 aa, Homo Sapiens
MEDLCVANTLFALNLFKHLAKASPTQNLFLSPWSISSTMAMVYMGSRGSTEDQMAKVLQFNEVGANAVTPMTPENFTSCGFMQQIQKGSYPDAILQAQAADKIHSSFRSLSSAINASTGNYLLESVNKLFGEKSASFREEYIRLCQKYYSSEPQAVDFLEC

SEQ ID NO: 12084 - protein, 415 aa, Homo Sapiens
MEDLCVANTLFALNLFKHLAKASPTQNLFLSPWSISSTMAMVYMGSRGSTEDQMAKVLQFNEVGANAVTPMTPENFTSCGFMQQIQKGSYPDAILQAQAADKIHSSFRSLSSAINASTGNYLLESVNKLFGEKSASFREEYIRLCQKYYSSEPQAVDFLECAEEARKKINSWVKTQTKGKIPNLLPEGSVDGDTRMVLVNAVYFKGKWKTPFEKKLNGLYPFRVNSAQRTPVQMMYLREKLNIGYIEDLKAQILELPYAGDVSMFLLLPDEIADVSTGLELLESEITYDKLNKWTSKDKMAEDEVEVYIPQFKLEEHYELRSILRSMGMEDAFNKGRANFSGMSERNDLFLSEVFHQAMVDVNEEGTEAAAGTGGVMTGRTGHGGPQFVADHPFLFLIMHKITNCILFFGRFSSP

SEQ ID NO: 12085 - protein, 415 aa, Homo Sapiens; identical to SEQ ID NO: 12084

SEQ ID NO: 12086 - protein, 259 aa, Homo Sapiens
MYSNVIGTVTSGKRKVYLLSLLLIGFWDCVTCHGSPVDICTAKPRDIPMNPMCIYRSPEKKATEDEGSEQKIPEATNRRVWELSKANSRFATTFYQHLADSKNDNDNIFLSPLSISTAFAMTKLGACNDTLQQLMEVFKFDTISEKTSDQIHFFFAKLNCRLYRKANKSSKLVSANRLFGDKSLTFNDLYVSDAFHKAFLEVNEEGSEAAASTAVVIAGRSLNPNRVTFKANRPFLVFIREVPLNTIIFMGRVANPCVK

SEQ ID NO: 12087 - protein, 464 aa, Homo Sapiens
MYSNVIGTVTSGKRKVYLLSLLLIGFWDCVTCHGSPVDICTAKPRDIPMNPMCIYRSPEKKATEDEGSEQKIPEATNRRVWELSKANSRFATTFYQHLADSKNDNDNIFLSPLSISTAFAMTKLGACNDTLQQLMEVFKFDTISEKTSDQIHFFFAKLNCRLYRKANKSSKLVSANRLFGDKSLTFNETYQDISELVYGAKLQPLDFKENAEQSRAAINKWVSNKTEGRITDVIPSEAINELTVLVLVNTIYFKGLWKSKFSPENTRKELFYKADGESCSASMMYQEGKFRYRRVAEGTQVLELPFKGDDITMVLILPKPEKSLAKVEKELTPEVLQEWLDELEEMMLVVHMPRFRIEDGFSLKEQLQDMGLVDLFSPEKSKLPGIVAEGRDDLYVSDAFHKAFLEVNEEGSEAAASTAVVIAGRSLNPNRVTFKANRPFLVFIREVPLNTIIFMGRVANPCVK

SEQ ID NO: 12088 - protein, 499 aa, Homo Sapiens
MKHSLNALLIFLIITSAWGGSKGPLDQLEKGGETAQSADPQWEQLNNKNLSMPLLPADFHKENTVTNDWIPEGEEDDDYLDLEKIFSEDDDYIDIVDSLSVSPTDSDVSAGNILQLFHGKSRIQRLNILNAKFAFNLYRVLKDQVNTFDNIFIAPVGISTAMGMISLGLKGETHEQVHSILHFKDFVNASSKYEITTIHNLFRKLTHRLFRRNFGYTLRSVNDLYIQKQFPILLDFKTKVREYYFAEAQIADFSDPAFISKTNNHIMKLTKGLIKDALENIDPATQMMILNCIYFKGSWVNKFPVEMTHNHNFRLNEREVVKVSMMQTKGNFLAANDQELDCDILQLEYVGGISMLIVVPHKMSGMKTLEAQLTPRVVERWQKSMTNRTREVLLPKFKLEKNYNLVESLKLMGIRMLFDKNGNMAGISDQRIAIDLFKHQGTITVNEEGTQATTVTTVGFMPLSTQVRFTVDRPFLFLIYEHRTSCLLFMGRVANPSRS

SEQ ID NO: 12089 - protein, 499 aa, Homo Sapiens; identical to SEQ ID NO: 12088

SEQ ID NO: 12090 - protein, 402 aa, Homo Sapiens [sequence omitted]

SEQ ID NO: 12091 - protein, 42 aa, Homo Sapiens
MNWHLPLFLLASVTLPSICSHFNPLSLEELGSNTGIQVFNQI

SEQ ID NO: 12092 - protein, 87 aa, Homo Sapiens
MNWHLPLFLLASVTLPSICSHFNPLSLEELGSNTGIQVFNQIVKSRPHDNIVISPHGIASVLGMLQLGADGRTKKQLAMVMRYGVNG

SEQ ID NO: 12093 - protein, 398 aa, Homo Sapiens
MNWHLPLFLLASVTLPSICSHFNPLSLEELGSNTGIQVFNQIVKSRPHDNIVISPHGIASVLGMLQLGADGRTKKQLAMVMRYGVNGVGKILKKINKAIVSKKNKDIVTVANAVFVKNASEIEVPFVTRNKDVFQCEVRNVNFEDPASACDSINAWVKNETRDMIDNLLSPDLIDGVLTRLVLVNAVYFKGLWKSRFQPENTKKRTFVAADGKSYQVPMLAQLSVFRCGSTSAPNDLWYNFIELPYHGESISMLIALPTESSTPLSAIIPHISTKTIDSWMSIMVPKRVQVILPKFTAVAQTDLKEPLKVLGITDMFDSSKANFAKITTGSENLHVSHILQKAKIEVSEDGTKASAATTAILIARSSPPWFIVDRPFLFFIRHNPTGAVLFMGQINKP

SEQ ID NO: 12094 - protein, 397 aa, Homo Sapiens
MNWHLPLFLLASVTLPSICSHFNPLSLEELGSNTGIQVFNQIVKSRPHDNIVISPHGIASVLGMLQLGADGRTKKQLAMVMRYGVNGVGKILKKINKAIVSKKNKDIVTVANAVFVKNASEIEVPFVTRNKDVFQCEVRNVNFEDPASACDSINAWVKNETRDMIDNLLSPDLIDGVLTRLVLVNAVYFKGLWKSRFQPENTKKRTFVAADGKSYQVPMLAQLSVFRCGSTSAPNDLWYNFIELPYHGESISMLIALPTESSTPLSAIIPHISTKTIDSWMSIMVPKRVQVILPKFTAVAQTDLKEPLKVLGITDMFDSSKANFAKITRSENLHVSHILQKAKIEVSEDGTKASAATTAILIARSSPPWFIVDRPFLFFIRHNPTGAVLFMGQINKP

SEQ ID NO: 12095 - protein, 397 aa, Homo Sapiens; identical to SEQ ID NO: 12094

SEQ ID NO: 12096 - protein, 276 aa, Homo Sapiens
MNWHLPLFLLASVTLPSICSHFNPLSLEELGSNTGIQVFNQIVKSRPHDNIVISPHGIASVLGMLQLGADGRTKKQLAMVMRYGVNGVGKILKKINKAIVSKKNKDIVTVANAVFVKNASEIEVPFVTRNKDVFQCEVRNVNFEDPASACDSINAWVKNETRDMIDNLLSPDLIDGVLTRLVLVNAVYFKGLWKSRFQPENTKKRTFVAADGKSYQVPMLAQLSVFRCGSTSAPNDLWYNFIELPYHGESISMLIALPTESSTPLSAIIPHISTKT

SEQ ID NO: 12097 - protein, 409 aa, Homo Sapiens
MSDCRSSLVEGTMNWHLPLFLLASVTLPSICSHFNPLSLEELGSNTGIQVFNQIVKSRPHDNIVISPHGIASVLGMLQLGADGRTKKQLAMVMRYGVNGVGKILKKINKAIVSKKNKDIVTVANAVFVKNASEIEVPFVTRNKDVFQCEVRNVNFEDPASACDSINAWVKNETRDMIDNLLSPDLIDGVLTRLVLVNAVYFKGLWKSRFQPENTKKRTFVAADGKSYQVPMLAQLSVFRCGSTSAPNDLWYNFIELPYHGESISMLIALPTESSTPLSAIIPHISTKTIDSWMSIMVPKRVQVILPKFTAVAQTDLKEPLKVLGITDMFDSSKANFAKITRSENLHVSHILQKAKIEVSEDGTKASAATTAILIARSSPPWFIVDRPFLFFIRHNPTGAVLFMGQINKP

SEQ ID NO: 12098 - protein, 48 aa, Homo Sapiens
MPPFLITLFLFHSCCLRANGHLREGMTLLKTEFALHLYQSVAACRNET

SEQ ID NO: 12099 - protein, 404 aa, Homo Sapiens
MPPFLITLFLFHSCCLRANGHLREGMTLLKTEFALHLYQSVAACRNETNFVISPAGVSLPLEILQFGAEGSTGQQLADALGYTVHDKRVKDFLHAVYATLPTSSQGTEMELACSLFVQVGTPLSPCFVEHVSWWANSSLEPADLSEPNSTAIQTSEGASRETAGGGPSEGPGGWPWEQVSAAFAQLVLVSTMSFQGTWRKRFSSTDTQILPFTCAYGLVLQVPMMHQTTEVNYGQFQDTAGHQVGVLELPYLGSAVSLFLVLPRDKDTPLSHIEPHLTASTIHLWTTSLRRARMDVFLPRFRIQNQFNLKSILNSWGVTDLFDPLKANLKGISGQDGFYVSEAIHKAKIEVLEEGTKASGATALLLLKRSRIPIFKADRPFIYFLREPNTGFVFSIGRVSNPLD

SEQ ID NO: 12100 - protein, 424 aa, Homo Sapiens
MPPFLITLFLFHSCCLRANGHLREGMTLLKTEFALHLYQSVAACRNETNFVISPAGVSLPLEILQFGAEGSTGQQLADALGYTVHDKRVKDFLHAVYATLPTSSQGTEMELACSLFVQVGTPLSPCFVEHVSWWANSSLEPADLSEPNSTAIQTSEGASRETAGGGPSEGPGGWPWEQVSAAFAQLVLVSTMSFQGTWRKRFSSTDTQILPFTCAYGLVLQVPMMHQTTEVNYGQFQDTAGHQVGVLELPYLGSAVSLFLVLPRDKDTPLSHIEPHLTASTIHLWTTSLRRARMDVFLPRFRIQNQFNLKSILNSWGVTDLFDPLKANLKGISGQDGFYVSEAIHKAKIEVLEEGTKASGATALLLLKRSRIPIFKADRPFIYFLREPNTGITVFFDRIQIIYQCLSSNKGSFVHYPLKNKHSF

SEQ ID NO: 12101 - protein, 404 aa, Homo Sapiens; identical to SEQ ID NO: 12099

SEQ ID NO: 12102 - protein, 91 aa, Homo Sapiens
MKGKLARSTKEIPDEISILLLGVAHFKGQWVTKFDSRKTSLEDFYLDEERTVRVPMMSDPKAVLRYGLDSDLSCKIAQLPLTGSMSIIFFL

SEQ ID NO: 12103 - protein, 99 aa, Homo Sapiens
MKGKLARSTKEIPDEISILLLGVAHFKGQWVTKFDSRKTSLEDFYLDEERTVRVPMMSDPKAVLRYGLDSDLSCKIAQLPLTGSMSIIFFLPLKVTQNL

SEQ ID NO: 12104 - protein, 128 aa, Homo Sapiens
MQALVLLLCIGALLGHSSCQNPASPPEEEEDPFFKVPVNKLAAAVSNFGYDLYRVRSSTSPTTNVLLSPLSVATALSALSLGAEQRTESIIHRALYYDLISSPDIHGTYKELLDTVTAPQKNLKSASR

SEQ ID NO: 12105 - protein, 87 aa, Homo Sapiens
MQALVLLLCIGALLGHSSCQNPASPPEEGSPDPDSTGALVEEEDPFFKVPVNKLAAAVSNFGYDLYRVRSSTSPTTNVLLSPLSVAT

SEQ ID NO: 12106 - protein, 111 aa, Homo Sapiens
MQALVLLLCIGALLGHSSCQNPASPPEEGSPDPDSTGALVEEEDPFFKVPVNKLAAAVSNFGYDLYRVRSSTSPTTNVLLSPLSVATALSALSLGAEQRTESIIHRALYYD

SEQ ID NO: 12107 - protein, 132 aa, Homo Sapiens
MQALVLLLCIGALLGHSSCQNPASPPEEGSPDPDSTGALVEEEDPFFKVPVNKLAAAVSNFGYDLYRVRSSTSPTTNVLLSPLSVATALSALSLGAEQRTESIIHRALYYDLISSPDIHGTYKELLDTVTAP

SEQ ID NO: 12108 - protein, 418 aa, Homo Sapiens
MQALVLLLCIGALLGHSSCQNPASPPEEGSPDPDSTGALVEEEDPFFKVPVNKLAAAVSNFGYDLYRVRSSTSPTTNVLLSPLSVATALSALSLGAEQRTESIIHRALYYDLISSPDIHGTYKELLDTVTAPQKNLKSASRIVFEKKLRIKSSFVAPLEKSYGTRPRVLTGNPRLDLQEINNWVQAQMKGKLARSTKEIPDEISILLLGVAHFKGQWVTKFDSRKTSLEDFYLDEERTVRVPMMSDPKAVLRYGLDSDLSCKIAQLPLTGSMSIIFFLPLKVTQNLTLIEESLTSEFIHDIDRELKTVQAVLTVPKLKLSYEGEVTKSLQEMKLQSLFDSPDFSKITGKPIKLTQVEHRAGFEWNEDGAGTTPSPGLQPAHLTFPLDYHLNQPFIFVLRDTDTGALLFIGKILDPRGP

SEQ ID NO: 12109 - protein, 114 aa, Homo Sapiens
MQALVLLLCIGALLGHSSCQNPASPPEEGSPDPDSTGALVEEEDPFFKVPVNKLAAAVSNFGYDLYRVRSSTSPTTNVLLSPLSVATALSALSLGLMPLTYFRKISKDENSLAT

SEQ ID NO: 12110 - protein, 138 aa, Homo Sapiens
MRSAFSFSVWRTSRWVTKFDSRKTSLEDFYLDEERTVRVPMMSDPKAVLRYGLDSDLSCKIAQLPLTGSMSIIFFLPLKVTQNLTLIEESLTSEFIHDIDRELKTVQAVLTVPKLKLSYEGEVTKSLQEMKLQSLFDS

SEQ ID NO: 12111 - protein, 491 aa, Homo Sapiens
MALLWGLLVLSWSCLQGPCSVFSPVSAMEPLGRQLTSGPNQEQVSPLTLLKLGNQEPGGQTALKSPPGVCSRDPTPEQTHRLARAMMAFTADLFSLVAQTSTCPNLILSPLSVALALSHLALGAQNHTLQRLQQVLHAGSGPCLPHLLSRLCQDLGPGAFRLAARMYLQKGFPIKEDFLEQSEQLFGAKPVSLTGKQEDDLANINQWVKEATEGKIQEFLSGLPEDTVLLLLNAIHFQGFWRNKFDPSLTQRDSFHLDEQFTVPVEMMQARTYPLRWFLLEQPEIQVAHFPFKNNMSFVVLVPTHFEWNVSQVLANLSWDTLHPPLVWERPTKVRLPKLYLKHQMDLVATLSQLGLQELFQAPDLRGISEQSLVVSGVQHQSTLELSEVGVEAAAATSIAMSRMSLSSFSVNRPFLFFIFEDTTGLPLFVGSVRNPNPSAPRELKEQQDSPGNKDFLQSLKGFPRGDKLFGPDLKLVPPMEEDYPQFGSPK

SEQ ID NO: 12112 - protein, 491 aa, Homo Sapiens; identical to SEQ ID NO: 12111

SEQ ID NO: 12113 - protein, 255 aa, Homo Sapiens
MALLWGLLVLSWSCLQGPCSVFSPVSAMEPLGRQLTSGPNQEQVSPLTLLKLGNQEPGGQTALKSPPGVCSRDPTPEQTHRLARAMMAFTADLFSLVAQTSTCPNLILSPLSVALALSHLALGAQNHTLQRLQQVLHAGSGPCLPHLLSRLCQDLGPGAFRLAARMYLQKGFPIKEDFLEQSEQLFGAKPVSLTGKQEDDLANINQWVKEATEGKIQEFLSGLPEDTVLLLLNAIHFQGFWRNKFDPSLTQRDSF

SEQ ID NO: 12114 - protein, 264 aa, Homo Sapiens
MALLWGLLVLSWSCLQGPCSVFSPVSAMEPLGRQLTSGPNQEQVSPLTLLKLGNQEPGGQTALKSPPGVCSRDPTPEQTHRLARAMMAFTADLFSLVAQTSTCPNLILSPLSVALALSHLALGFWRNKFDPSLTQRDSFHLDEQFTVPVEMMQARTYPLRWFLLEQPEIQVAHFPFKNNMSFVVLVPTHFEWNVSQVLANLSWDTLHPPLVWERPTKVRLPKLYLKHQMDLVATLSQLGLQELFQAPDLRGISEQSLVVSGVQH

SEQ ID NO: 12115 - protein, 427 aa, Homo Sapiens
MALLWGLLVLSWSCLQGPCSVFSPVSAMEPLGRQLTSGPNQEQVSPLTLLKLGNQVQPGAQNHTLQRLQQVLHAGSGPCLPHLLSRLCQDLGPGAFRLAARMYLQKGFPIKEDFLEQSEQLFGAKPVSLTGKQEDDLANINQWVKEATEGKIQEFLSGLPEDTVLLLLNAIHFQGFWRNKFDPSLTQRDSFHLDEQFTVPVEMMQARTYPLRWFLLEQPEIQVAHFPFKNNMSFVVLVPTHFEWNVSQVLANLSWDTLHPPLVWERPTKVRLPKLYLKHQMDLVATLSQLGLQELFQAPDLRGISEQSLVVSGVQHQSTLELSEVGVEAAAATSIAMSRMSLSSFSVNRPFLFFIFEDTTGLPLFVGSVRNPNPSAPRELKEQQDSPGNKDFLQSLKGFPRGDKLFGPDLKLVPPMEEDYPQFGSPK

SEQ ID NO: 12116 - protein, 86 aa, Homo Sapiens
AKWKTTFDPKKTRMEPFHFKNSVIKVPMMNSKKYPVAHFIDQTLKAKPWPRQTLYILGWKQDSQVSSCISTILNGKMWGSCSSPTI

SEQ ID NO: 12117 - protein, 133 aa, Homo Sapiens [sequence omitted]

SEQ ID NO: 12118 - protein, 160 aa, Homo Sapiens
MASRLTLLTLLLLLLAGDRASSNPNATSSSSQDPESLQDRGEGKVATTVISKMLFVEPILEVSSLPTTNSTTNSATKITANTTDEPTTQPTTEPTTQPTIQPTQPTTQLPTDSPTQPTTGSFCPGPVTLCSDLESHSTEAVLGDALVDFSLKLYHAFSAM

SEQ ID NO: 12119 - protein, 500 aa, Homo Sapiens
MASRLTLLTLLLLLLAGDRASSNPNATSSSSQDPESLQDRGEGKVATTVISKMLFVEPILEVSSLPTTNSTTNSATKITANTTDEPTTQPTTEPTTQPTIQPTQPTTQLPTDSPTQPTTGSFCPGPVTLCSDLESHSTEAVLGDALVDFSLKLYHAFSAMKKVETNMAFSPFSIASLLTQVLLGAGENTKTNLESILSYPKDFTCVHQALKGFTTKGVTSVSQIFHSPDLAIRDTFVNASRTLYSSSPRVLSNNSDANLELINTWVAKNTNNKISRLLDSLPSDTRLVLLNAIYLSAKWKTTFDPKKTRMEPFHFKNSVIKVPMMNSKKYPVAHFIDQTLKAKVGQLQLSHNLSLVILVPQNLKHRLEDMEQALSPSVFKAIMEKLEMSKFQPTLLTLPRIKVTTSQDMLSIMEKLEFFDFSYDLNLCGLTEDPDLQVSAMQHQTVLELTETGVEAAAASAISVARTLLVFEVQQPFLFVLWDQQHKFPVFMGRVYDPRA

SEQ ID NO: 12120 - protein, 463 aa, Homo Sapiens
MASRLTLLTLLLLLLAGDRASSNPNATSSSSQDPESLQDRGEGKVATTVISKMLFVEPILEVSSLPTTNSTTNSATKITANTTDEPTTQPTTEPTTQPTIQPTQPTTQLPTDSPTQPTTGSFCPGPVTLCSDLESHSTEAVLGDALVDFSLKLYHAFSAMKKVETNMAFSPFSIASLLTQVLLGAGENTKTNLESILSYPKDFTCVHQALKGFTTKGVTSVSQIFHSPDLAIRDTFVNASRTLYSSSPRVLSNNSDANLELINTWVAKNTNNKISRLLDSLPSDTRLVLLNAIYLSAKWKTTFDPKKTRMEPFHFKNSVIKVPMMNSKKYPVAHFIDQTLKAKAIMEKLEMSKFQPTLLTLPRIKVTTSQDMLSIMEKLEFFDFSYDLNLCGLTEDPDLQVSAMQHQTVLELTETGVEAAAASAISVARTLLVFEVQQPFLFVLWDQQHKFPVFMGRVYDPRA

SEQ ID NO: 12121 - protein, 505 aa, Homo Sapiens
MASRLTLLTLLLLLLAGFLEPQDRASSNPNATSSSSQDPESLQDRGEGKVATTVISKMLFVEPILEVSSLPTTNSTTNSATKITANTTDEPTTQPTTEPTTQPTIQPTQPTTQLPTDSPTQPTTGSFCPGPVTLCSDLESHSTEAVLGDALVDFSLKLYHAFSAMKKVETNMAFSPFSIASLLTQVLLGAGENTKTNLESILSYPKDFTCVHQALKGFTTKGVTSVSQIFHSPDLAIRDTFVNASRTLYSSSPRVLSNNSDANLELINTWVAKNTNNKISRLLDSLPSDTRLVLLNAIYLSAKWKTTFDPKKTRMEPFHFKNSVIKVPMMNSKKYPVAHFIDQTLKAKVGQLQLSHNLSLVILVPQNLKHRLEDMEQALSPSVFKAIMEKLEMSKFQPTLLTLPRIKVTTSQDMLSIMEKLEFFDFSYDLNLCGLTEDPDLQVSAMQHQTVLELTETGVEAAAASAISVARTLLVFEVQQPFLFVLWDQQHKFPVFMGRVYDPRA

SEQ ID NO: 12122 - protein, 43 aa, Homo Sapiens
MASRLTLLTLLLLLLAGGLGRTPKQTWRASSLTPRTSPVSTRP

SEQ ID NO: 12123 - protein, 43 aa, Homo Sapiens; identical to SEQ ID NO: 12122

SEQ ID NO: 12124 - protein, 122 aa, Homo Sapiens
MGAGPGRGGGPWAPRVGAGSEAGWLRRSADVAAQMASRLTLLTLLLLLLAGDRASSNPNATSSSSQDPESLQDRGEGKVATTVISKMLFVEPILEVSSLPTTNSTTNSATKITANTTDEPTT

SEQ ID NO: 12125 - protein, 543 aa, Homo Sapiens
MGAGPGRGGGPWAPRVGAGSEAGWLRRSADVAAQMASRLTLLTLLLLLLAGDRASSNPNATSSSSQDPESLQDRGEGKVATTVISKMLFVEPILEVSSLPTTNSTTNSATKITANTTDEPTTQPTTEPTTQPTIQPTQPTTQLPTDSPTQPTTGSFCPGPVTLCSDLESHSTEAVLGDALVDFSLKLYHAFSAMKKVETNMAFSPFSIASLLTQVLLGAGENTKTNLESILSYPKDFTCVHQALKGFTTKGVTSVSQIFHSPDLAIRDTFVNASRTLYSSSPRVLSNNSDANLELINTWVAKNTNNKISRLLDSLPSDTRLVLLNAIYLSEQPSHLFPLAKWKTTFDPKKTRMEPFHFKNSVIKVPMMNSKKYPVAHFIDQTLKAKVGQLQLSHNLSLVILVPQNLKHRLEDMEQALSPSVFKAIMEKLEMSKFQPTLLTLPRIKVTTSQDMLSIMEKLEFFDFSYDLNLCGLTEDPDLQVSAMQHQTVLELTETGVEAAAASAISVARTLLVFEVQQPFLFVLWDQQHKFPVFMGRVYDPRA

SEQ ID NO: 12126 - protein, 448 aa, Homo Sapiens
MLFVEPILEVSSLPTTNSTTNSATKITANTTDEPTTQPTTEPTTQPTIQPTQPTTQLPTDSPTQPTTGSFCPGPVTLCSDLESHSTEAVLGDALVDFSLKLYHAFSAMKKVETNMAFSPFSIASLLTQVLLGAGENTKTNLESILSYPKDFTCVHQALKGFTTKGVTSVSQIFHSPDLAIRDTFVNASRTLYSSSPRVLSNNSDANLELINTWVAKNTNNKISRLLDSLPSDTRLVLLNAIYLSAKWKTTFDPKKTRMEPFHFKNSVIKVPMMNSKKYPVAHFIDQTLKAKVGQLQLSHNLSLVILVPQNLKHRLEDMEQALSPSVFKAIMEKLEMSKFQPTLLTLPRIKVTTSQDMLSIMEKLEFFDFSYDLNLCGLTEDPDLQVSAMQHQTVLELTETGVEAAAASAISVARTLLVFEVQQPFLFVLWDQQHKFPVFMGRVYDPRA

SEQ ID NO: 12127 - protein, 150 aa, Homo Sapiens
MRSLLLLSAFCLLEAALAAEVKKPAAAAAPGTAEKLSPKAATLAERSAGLAFSLYQAMAKDQAVENILVSPVVVASSLGLVSLGGKATTASQAKAVLSAEQLRDEEVHAGLGELLRSLSNSTARNVTWKLGSRLYGPSSVSFADDFVRSS

SEQ ID NO: 12128 - protein, 165 aa, Homo Sapiens
MRSLLLLSAFCLLEAALAAEVKKPAAAAAPGTAEKLSPKAATLAERSAGLAFSLYQAMAKDQAVENILVSPVVVASSLGLVSLGGKATTASQAKAVLSAEQLRDEEVHAGLGELLRSLSNSTARNVTWKLGSRLYGPSSVSFADDFVRSSKQHYNCEHSKINFRD

SEQ ID NO: 12129 - protein, 167 aa, Homo Sapiens
MRSLLLLSAFCLLEAALAAEVKKPAAAAAPGTAEKLSPKAATLAERSAGLAFSLYQAMAKDQAVENILVSPVVVASSLGLVSLGGKATTASQAKAVLSAEQLRDEEVHAGLGELLRSLSNSTARNVTWKLGSRLYGPSSVSFADDFVRSSKQHYNCEHSKINFRDKR

SEQ ID NO: 12130 - protein, 203 aa, Homo Sapiens
MRSLLLLSAFCLLEAALAAEVKKPAAAAAPGTAEKLSPKAATLAERSAGLAFSLYQAMAKDQAVENILVSPVVVASSLGLVSLGGKATTASQAKAVLSAEQLRDEEVHAGLGELLRSLSNSTARNVTWKLGSRLYGPSSVSFADDFVRSSKQHYNCEHSKINFRDKRSALQSINEWAAQTTDGKLPEVTKDVERTDGALLVNA

SEQ ID NO: 12131 - protein, 247 aa, Homo Sapiens
MRSLLLLSAFCLLEAALAAEVKKPAAAAAPGTAEKLSPKAATLAERSAGLAFSLYQAMAKDQAVENILVSPVVVASSLGLVSLGGKATTASQAKAVLSAEQLRDEEVHAGLGELLRSLSNSTARNVTWKLGSRLYGPSSVSFADDFVRSSKQHYNCEHSKINFRDKRSALQSINEWAAQTTDGKLPEVTKDVERTDGALLVNAMFFKPHWDEKFHHKMVDNRGFMVTRSYTVGVMMMHRTGLYNYYD

SEQ ID NO: 12132 - protein, 249 aa, Homo Sapiens
MRSLLLLSAFCLLEAALAAEVKKPAAAAAPGTAEKLSPKAATLAERSAGLAFSLYQAMAKDQAVENILVSPVVVASSLGLVSLGGKATTASQAKAVLSAEQLRDEEVHAGLGELLRSLSNSTARNVTWKLGSRLYGPSSVSFADDFVRSSKQHYNCEHSKINFRDKRSALQSINEWAAQTTDGKLPEVTKDVERTDGALLVNAMFFKPHWDEKFHHKMVDNRGFMVTRSYTVGVMMMHRTGLYNYYDDE

SEQ ID NO: 12133 - protein, 418 aa, Homo Sapiens
MRSLLLLSAFCLLEAALAAEVKKPAAAAAPGTAEKLSPKAATLAERSAGLAFSLYQAMAKDQAVENILVSPVVVASSLGLVSLGGKATTASQAKAVLSAEQLRDEEVHAGLGELLRSLSNSTARNVTWKLGSRLYGPSSVSFADDFVRSSKQHYNCEHSKINFRDKRSALQSINEWAAQTTDGKLPEVTKDVERTDGALLVNAMFFKPHWDEKFHHKMVDNRGFMVTRSYTVGVMMMHRTGLYNYYDDEKEKLQIVEMPLAHKLSSLIILMPHHVEPLERLEKLLTKEQLKIWMGKMQKKAVAISLPKGVVEVTHDLQKHLAGLGLTEAIDKNKADLSRMSGKKDLYLASVFHATAFELDTDGNPFDQDIYGREELRSPKLFYADHPFIFLVRDTQSGSLLFIGRLVRPKGDKMRDEL

SEQ ID NO: 12134 - protein, 418 aa, Homo Sapiens; identical to SEQ ID NO: 12133

SEQ ID NO: 12135 - protein, 295 aa, Homo Sapiens
MRSLLLLSAFCLLEAALAAEVKKPAAAAAPGTAEKLSPKAATLAERSAGLAFSLYQAMAKDQAVENILVSPVVVASSLGLVSLGGKATTASQAKAVLSAEQLRDEEVHAGLGELLRSLSNSTARNVTWKLGSRLYGPSSVSFADDFVRSSKQHYNCEHSKINFRDKRSALQSINEWAAQTTDGKLPEVTKDVERTDGALLVNAMFFKPHWDEKFHHKMVDNRGFMVTRSYTVGVMMMHRTGLYNYYDDEKEKLQIVEMPLAHKLSSLIILMPHHVEPLERLEKLLTKEQLKIWMG

SEQ ID NO: 12136 - protein, 418 aa, Homo Sapiens; identical to SEQ ID NO: 12133

SEQ ID NO: 12137 - protein, 324 aa, Homo Sapiens
MRSLLLLSAFCLLEAALAAEVKKPAAAAAPGTAEKLSPKAATLAERSAGLAFSLYQAMAKDQAVENILVSPVVVASSLGLVSLGGKATTASQAKAVLSAEQLRDEEVHAGLGELLRSLSNSTARNVTWKLGSRLYGPSSVSFADDFVRSSKQHYNCEHSKINFRDKRSALQSINEWAAQTTDGKLPEVTKDVERTDGALLVNAMFFKPHWDEKFHHKMVDNRGFMVTRSYTVGVMMMHRTGLYNYYDDEKEKLQIVEMPLAHKLSSLIILMPHHVEPLERLEKLLTKEQLKIWMGKMQKKAVAISLPKGVVEVTHDLQVRGGPA

SEQ ID NO: 12138 - protein, 142 aa, Homo Sapiens
MRSLLLLSAFCLLEAALAAEVKKPAAAAAPGTAEKLSPKATTASQAKAVLSAEQLRDEEVHAGLGELLRSLSNSTARNVTWKLGSRLYGPSSVSFADDFVRSSKQHYNCEHSKINFRDKRSALQSINEWAAQTTDGKLPEVT

SEQ ID NO: 12139 - protein, 86 aa, Homo Sapiens [sequence omitted]

SEQ ID NO: 12140 - protein, 201 aa, Homo Sapiens
MVDNRGFMVTRSYTVGVMMMHRTGLYNYYDDEKEKLQIVEMPLAHKLSSLIILMPHHVEPLERLEKLLTKEQLKIWMGKMQKKAVAISLPKGVVEVTHDLQKHLAGLGLTEAIDKNKADLSRMSGKKDLYLASVFHATAFELDTDGNPFDQDIYGREELRSPKLFYADHPFIFLVRDTQSGSLLFIGRLVRPKGDKMRDEL

SEQ ID NO: 12141 - protein, 56 aa, Homo Sapiens
  misc_feature (1)..(1): Xaa can be any naturally occurring amino acid
XNPFDQDIYGREELRSPKLFYADHPFIFLVRDTQSGSLLFIGRLVRPKGDKMRDEL

SEQ ID NO: 12142 - protein, 160 aa, Homo Sapiens
MAFLGLFSLLVLQSMATGATFPEEAIADLSVNMYNRLRATGEDENILFSPLSIALAMGMMELGAQGSTQKEIRHSMGYDSLKNGEEFSFLKEFSNMVTAKESQYVMKIANSLFVQNGFHVNEEFLQMMKKYFNAAVNHVDFSQNVAVANYINKWVENNTN

SEQ ID NO: 12143 - protein, 245 aa, Homo Sapiens
MAFLGLFSLLVLQSMATGATFPEEAIADLSVNMYNRLRATGEDENILFSPLSIALAMGMMELGAQGSTQKEIRHSMGYDSLKNGEEFSFLKEFSNMVTAKESQYVMKIANSLFVQNGFHVNEEFLQMMKKYFNAAVNHVDFSQNVAVANYINKWVENNTNNLVKDLVSPRDFDAATYLALINAVYFKGNWKSQFRPENTRTFSFTKDDESEVQIPMMYQQGEFYYGEFSDGSNEAGGIYQVLEIP

SEQ ID NO: 12144 - protein, 410 aa, Homo Sapiens
MAFLGLFSLLVLQSMATGATFPEEAIADLSVNMYNRLRATGEDENILFSPLSIALAMGMMELGAQGSTQKEIRHSMGYDSLKNGEEFSFLKEFSNMVTAKESQYVMKIANSLFVQNGFHVNEEFLQMMKKYFNAAVNHVDFSQNVAVANYINKWVENNTNNLVKDLVSPRDFDAATYLALINAVYFKGNWKSQFRPENTRTFSFTKDDESEVQIPMMYQQGEFYYGEFSDGSNEAGGIYQVLEIPYEGDEISMMLVLSRQEVPLATLEPLVKAQLVEEWANSVKKQKVEVYLPRFTVEQEIDLKDVLKALGITEIFIKDANLTGLSDNKEIFLSKAIHKSFLEVNEEGSEAAAVSGMIAISRMAVLYPQVIVDHPFFFLIRNRRTGTILFMGRVMHPETMNTSGHDFEEL

SEQ ID NO: 12145 - protein, 410 aa, Homo Sapiens; identical to SEQ ID NO: 12144

SEQ ID NO: 12146 - protein, 119 aa, Homo Sapiens
  misc_feature (1)..(1): Xaa can be any naturally occurring amino acid
XSRFTVEQEIDLKDVLKALGITEIFIKDANLTGLSDNKEIFLSKAIHKSFLEVNEEGSEAAAVSGMIAISRMAVLYPQVIVDHPFFFLIRNRRTGTILFMGRVMHPETMNTSGHDFEEL

SEQ ID NO: 12147 - protein, 157 aa, Homo Sapiens
MDTIFLWSLLLLFFGSQASRCSAQKNTEFAVDLYQEVSLSHKDNIIFSPLGITLVLEMVQLGAKGKAQQQIRQTLKQQETSAEKKQEFTFNLANALYLQEGFTVKEQYLHGNKEFFQSAIKLVDFQDAKACAEMISTWVERKTDGKIKDMFSGEEFG

SEQ ID NO: 12148 - protein, 206 aa, Homo Sapiens
MDTIFLWSLLLLFFGSQASRCSAQKNTEFAVDLYQEVSLSHKDNIIFSPLGITLVLEMVQLGAKGKAQQQIRQTLKQQETSAGEEFFVLKSFFSAISEKKQEFTFNLANALYLQEGFTVKEQYLHGNKEFFQSAIKLVDFQDAKACAEMISTWVERKTDGKIKDMFSGEEFGPLTRLVLVNAIYFKGDWKQKFRKEDTQLINFTKK

SEQ ID NO: 12149 - protein, 405 aa, Homo Sapiens
MDTIFLWSLLLLFFGSQASRCSAQKNTEFAVDLYQEVSLSHKDNIIFSPLGITLVLEMVQLGAKGKAQQQIRQTLKQQETSAGEEFFVLKSFFSAISEKKQEFTFNLANALYLQEGFTVKEQYLHGNKEFFQSAIKLVDFQDAKACAEMISTWVERKTDGKIKDMFSGEEFGPLTRLVLVNAIYFKGDWKQKFRKEDTQLINFTKKNGSTVKIPMMKALLRTKYGYFSESSLNYQVLELSYKGDEFSLIIILPAEGMDIEEVEKLITAQQILKWLSEMQEEEVEISLPRFKVEQKVDFKDVLYSLNITEIFSGGCDLSGITDSSEVYVSQVTQKVFFEINEDGSEAATSTGIHIPVIMSLAQSQFIANHPFLFIMKHNPTESILFMGRVTNPDTQEIKGRDLDSL

SEQ ID NO: 12150 - protein, 405 aa, Homo Sapiens; identical to SEQ ID NO: 12149

SEQ ID NO: 12151 - protein, 405 aa, Homo Sapiens; identical to SEQ ID NO: 12149

SEQ ID NO: 12152 - protein, 405 aa, Homo Sapiens; identical to SEQ ID NO: 12149

SEQ ID NO: 12153 - protein, 415 aa, Homo Sapiens
MIQNLMREVKMDTIFLWSLLLLFFGSQASRCSAQKNTEFAVDLYQEVSLSHKDNIIFSPLGITLVLEMVQLGAKGKAQQQIRQTLKQQETSAGEEFFVLKSFFSAISEKKQEFTFNLANALYLQEGFTVKEQYLHGNKEFFQSAIKLVDFQDAKACAEMISTWVERKTDGKIKDMFSGEEFGPLTRLVLVNAIYFKGDWKQKFRKEDTQLINFTKKNGSTVKIPMMKALLRTKYGYFSESSLNYQVLELSYKGDEFSLIIILPAEGMDIEEVEKLITAQQILKWLSEMQEEEVEISLPRFKVEQKVDFKDVLYSLNITEIFSGGCDLSGITDSSEVYVSQVTQKVFFEINEDGSEAATSTGIHIPVIMSLAQSQFIANHPFLFIMKHNPTESILFMGRVTNPDTQEIKGRDLDSL

SEQ ID NO: 12154 - protein, 853 aa, Homo Sapiens
MGTPRAQHPPPPQLLFLILLSCPWIQGLPLKEEEILPEPGSETPTVASEALAELLHGALLRRGPEMGYLPGPPLGPEGGEEETTTTIITTTTVTTTVTSPVLCNNNISEGEGYVESPDLGSPVSRTLGLLDCTYSIHVYPGYGIEIQVQTLNLSQEEELLVLAGGGSPGLAPRLLANSSMLGEGQVLRSPTNRLLLHFQSPRVPRGGGFRIHYQAYLLSCGFPPRPAHGDVSVTDLHPGGTATFHCDSGYQLQGEETLICLNGTRPSWNGETPSCMASCGGTIHNATLGRIVSPEPGGAVGPNLTCRWVIEAAEGRRLHLHFERVSLDEDNDRLMVRSGGSPLSPVIYDSDMDDVPERGLISDAQSLYVELLSETPANPLLLSLRFEAFEEDRCFAPFLAHGNVTTTDPEYRPGALATFSCLPGYALEPPGPPNAIECVDPTEPHWNDTEPACKAMCGGELSEPAGVVLSPDWPQSYSPGQDCVWGVHVQEEKRILLQVEILNVREGDMLTLFDGDGPSARVLAQLRGPQPRRRLLSSGPDLTLQFQAPPGPPNPGLGQGFVLHFKEVPRNDTCPELPPPEWGWRTASHGDLIRGTVLTYQCEPGYELLGSDILTCQWDLSWSAAPPACQKIMTCADPGEIANGHRTASDAGFPVGSHVQYRCLPGYSLEGAAMLTCYSRDTGTPKWSDRVPKCALKYEPCLNPGVPENGYQTLYKHHYQAGESLRFFCYEGFELIGEVTITCVPGHPSQWTSQPPLCKVAYEELLDNRKLEVTQTTDPSRQLEGGNLALAILLPLGLVIVLGSGVYIYYTKLQGKSLFGFSGSHSYSPITVESDFSNPLYEAGDTREYEVSI

SEQ ID NO: 12155 - protein, 809 aa, Homo Sapiens
MGTPRAQHPPPPQLLFLILLSCPWIQGLPLKEEEILPEPGSETPTVASEALAELLHGALLRRGPEMGYLPGSDRDPTLATPPAGQTLAVPSLPRATEPGTGPLTTAVTPNGVRGAGPTAPELLTPPPGTTAPPPPSPASPGPPLGPEGGEEETTTTIITTTTVTTTVTSPAYLLSCGFPPRPAHGDVSVTDLHPGGTATFHCDSGYQLQGEETLICLNGTRPSWNGETPSCMASCGGTIHNATLGRIVSPEPGGAVGPNLTCRWVIEAAEGRRLHLHFERVSLDEDNDRLMVRSGGSPLSPVIYDSDMDDVPERGLISDAQSLYVELLSETPANPLLLSLRFEAFEEDRCFAPFLAHGNVTTTDPEYRPGALATFSCLPGYALEPPGPPNAIECVDPTEPHWNDTEPACKAMCGGELSEPAGVVLSPDWPQSYSPGQDCVWGVHVQEEKRILLQVEILNVREGDMLTLFDGDGPSARVLAQLRGPQPRRRLLSSGPDLTLQFQAPPGPPNPGLGQGFVLHFKEVPRNDTCPELPPPEWGWRTASHGDLIRGTVLTYQCEPGYELLGSDILTCQWDLSWSAAPPACQKIMTCADPGEIANGHRTASDAGFPVGSHVQYRCLPGYSLEGAAMLTCYSRDTGTPKWSDRVPKCALKYEPCLNPGVPENGYQTLYKHHYQAGESLRFFCYEGFELIGEVTITCVPGHPSQWTSQPPLCKVAYEELLDNRKLEVTQTTDPSRQLEGGNLALAILLPLGLVIVLGSGVYIYYTKLQGKSLFGFSGSHSYSPITVESDFSNPLYEAGDTREYEVSI

SEQ ID NO: 12156 - protein, 910 aa, Homo Sapiens
MGTPRAQHPPPPQLLFLILLSCPWIQGLPLKEEEILPEPGSETPTVASEALAELLHGALLRRGPEMGYLPGSDRDPTLATPPAGQTLAVPSLPRATEPGTGPLTTAVTPNGVRGAGPTAPELLTPPPGTTAPPPPSPASPGPPLGPEGGEEETTTTIITTTTVTTTVTSPVLCNNNISEGEGYVESPDLGSPVSRTLGLLDCTYSIHVYPGYGIEIQVQTLNLSQEEELLVLAGGGSPGLAPRLLANSSMLGEGQVLRSPTNRLLLHFQSPRVPRGGGFRIHYQAYLLSCGFPPRPAHGDVSVTDLHPGGTATFHCDSGYQLQGEETLICLNGTRPSWNGETPSCMASCGGTIHNATLGRIVSPEPGGAVGPNLTCRWVIEAAEGRRLHLHFERVSLDEDNDRLMVRSGGSPLSPVIYDSDMDDVPERGLISDAQSLYVELLSETPANPLLLSLRFEAFEEDRCFAPFLAHGNVTTTDPEYRPGALATFSCLPGYALEPPGPPNAIECVDPTEPHWNDTEPACKAMCGGELSEPAGVVLSPDWPQSYSPGQDCVWGVHVQEEKRILLQVEILNVREGDMLTLFDGDGPSARVLAQLRGPQPRRRLLSSGPDLTLQFQAPPGPPNPGLGQGFVLHFKEVPRNDTCPELPPPEWGWRTASHGDLIRGTVLTYQCEPGYELLGSDILTCQWDLSWSAAPPACQKIMTCADPGEIANGHRTASDAGFPVGSHVQYRCLPGYSLEGAAMLTCYSRDTGTPKWSDRVPKCALKYEPCLNPGVPENGYQTLYKHHYQAGESLRFFCYEGFELIGEVTITCVPGHPSQWTSQPPLCKVTQTTDPSRQLEGGNLALAILLPLGLVIVLGSGVYIYYTKLQGKSLFGFSGSHSYSPITVESDFSNPLYEAGDTREYEVSI

SEQ ID NO: 12157 - protein, 923 aa, Homo Sapiens
MGTPRAQHPPPPQLLFLILLSCPWIQGLPLKEEEILPEPGSETPTVASEALAELLHGALLRRGPEMGYLPGSDRDPTLATPPAGQTLAVPSLPRATEPGTGPLTTAVTPNGVRGAGPTAPELLTPPPGTTAPPPPSPASPGPPLGPEGGEEETTTTIITTTTVTTTVTSPVLCNNNISEGEGYVESPDLGSPVSRTLGLLDCTYSIHVYPGYGIEIQVQTLNLSQEEELLVLAGGGSPGLAPRLLANSSMLGEGQVLRSPTNRLLLHFQSPRVPRGGGFRIHYQAYLLSCGFPPRPAHGDVSVTDLHPGGTATFHCDSGYQLQGEETLICLNGTRPSWNGETPSCMASCGGTIHNATLGRIVSPEPGGAVGPNLTCRWVIEAAEGRRLHLHFERVSLDEDNDRLMVRSGGSPLSPVIYDSDMDDVPERGLISDAQSLYVELLSETPANPLLLSLRFEAFEEDRCFAPFLAHGNVTTTDPEYRPGALATFSCLPGYALEPPGPPNAIECVDPTEPHWNDTEPACKAMCGGELSEPAGVVLSPDWPQSYSPGQDCVWGVHVQEEKRILLQVEILNVREGDMLTLFDGDGPSARVLAQLRGPQPRRRLLSSGPDLTLQFQAPPGPPNPGLGQGFVLHFKEVPRNDTCPELPPPEWGWRTASHGDLIRGTVLTYQCEPGYELLGSDILTCQWDLSWSAAPPACQKIMTCADPGEIANGHRTASDAGFPVGSHVQYRCLPGYSLEGAAMLTCYSRDTGTPKWSDRVPKCALKYEPCLNPGVPENGYQTLYKHHYQAGESLRFFCYEGFELIGEVTITCVPGHPSQWTSQPPLCKVAYEELLDNRKLEVTQTTDPSRQLEGGNLALAILLPLGLVIVLGSGVYIYYTKLQGKSLFGFSGSHSYSPITVESDFSNPLYEAGDTREYEVSI

SEQ ID NO: 12158 - protein, 81 aa, Homo Sapiens
MGTPRAQHPPPPQLLFLILLSCPWIQGSDRDPTLATPPAGQTLAVPSLPRATEPGTGPLTTAVTPNGVRGAGPTAPELLTP

SEQ ID NO: 12159 - protein, 879 aa, Homo Sapiens
MGTPRAQHPPPPQLLFLILLSCPWIQGSDRDPTLATPPAGQTLAVPSLPRATEPGTGPLTTAVTPNGVRGAGPTAPELLTPPPGTTAPPPPSPASPGPPLGPEGGEEETTTTIITTTTVTTTVTSPVLCNNNISEGEGYVESPDLGSPVSRTLGLLDCTYSIHVYPGYGIEIQVQTLNLSQEEELLVLAGGGSPGLAPRLLANSSMLGEGQVLRSPTNRLLLHFQSPRVPRGGGFRIHYQAYLLSCGFPPRPAHGDVSVTDLHPGGTATFHCDSGYQLQGEETLICLNGTRPSWNGETPSCMASCGGTIHNATLGRIVSPEPGGAVGPNLTCRWVIEAAEGRRLHLHFERVSLDEDNDRLMVRSGGSPLSPVIYDSDMDDVPERGLISDAQSLYVELLSETPANPLLLSLRFEAFEEDRCFAPFLAHGNVTTTDPEYRPGALATFSCLPGYALEPPGPPNAIECVDPTEPHWNDTEPACKAMCGGELSEPAGVVLSPDWPQSYSPGQDCVWGVHVQEEKRILLQVEILNVREGDMLTLFDGDGPSARVLAQLRGPQPRRRLLSSGPDLTLQFQAPPGPPNPGLGQGFVLHFKEVPRNDTCPELPPPEWGWRTASHGDLIRGTVLTYQCEPGYELLGSDILTCQWDLSWSAAPPACQKIMTCADPGEIANGHRTASDAGFPVGSHVQYRCLPGYSLEGAAMLTCYSRDTGTPKWSDRVPKCALKYEPCLNPGVPENGYQTLYKHHYQAGESLRFFCYEGFELIGEVTITCVPGHPSQWTSQPPLCKVAYEELLDNRKLEVTQTTDPSRQLEGGNLALAILLPLGLVIVLGSGVYIYYTKLQGKSLFGFSGSHSYSPITVESDFSNPLYEAGDTREYEVSI

SEQ ID NO: 12160 - protein, 303 aa, Homo Sapiens
  misc_feature (1)..(1): Xaa can be any naturally occurring amino acid
XCLNGTRPSWNGETPSCMASCGGTIHNATLGRIVSPEPGGAVGPNLTCRWVIEAAEGRRLHLHFERVSLDEDNDRLMVRSGGSPLSPVIYDSDMDDVPERGLISDAQSLYVELLSETPANPLLLSLRFEAMCGGELSEPAGVVLSPDWPQSYSPGQDCVWGVHVQEEKRILLQVEILNVREGDMLTLFDGDGPSARVLAQLRGPQPRRRLLSSGPDLTLQFQAPPGPPNPGLGQGFVLHFKEVPRNDTCPELPPPEWGWRTASHGDLIRGTVLTYQCEPGYELLGSDILTCQWDLSWSAAPPA

SEQ ID NO: 12161 - protein, 314 aa, Homo Sapiens
MGIGRSEGGRRGAALGVLLALGAALLAVGSASEYDYVSFQSDIGPYQSGRFYTKPPQCVDIPADLRLCHNVGYKKMVLPNLLEHETMAEVKQQASSWVPLLNKNCHAGTQVFLCSLFAPVCLDRPIYPCRWLCEAVRDSCEPVMQFFGFYWPEMLKCDKFPEGDVCIAMTPPNATEASKPQGTTVCPPCDNELKSEAIIEHLCASEFALRMKIKEVKKENGDKKIVPKKKKPLKLGPIKKKDLKKLVLYLKNGADCPCHQLDNLSHHFLIMGRKVKSQYLLTAIHKWDKKNKEFKNFMKKMKNHECPTFQSVFK

SEQ ID NO: 12162 - protein, 178 aa, Homo Sapiens
MGWGNPIIAVFRTPFAPWLQFHWSAPFSAWLGTVLTHLHSSQQRSGTTVCPPCDNELKSEAIIEHLCASEFALRMKIKEVKKENGDKKIVPKKKKPLKLGPIKKKDLKKLVLYLKNGADCPCHQLDNLSHHFLIMGRKVKSQYLLTAIHKWDKKNKEFKNFMKKMKNHECPTFQSVFK

SEQ ID NO: 12163 - protein, 295 aa, Homo Sapiens
MLQGPGSLLLLFLASHCCLGSARGLFLFGQPDFSYKRSNCKPIPANLQLCHGIEYQNMRLPNLLGHETMKEVLEQAGAWIPLVMKQCHPDTKKFLCSLFAPVCLDDLDETIQPCHSLCVQVKDRCAPVMSAFGFPWPDMLECDRFPQDNDLCIPLASSDHLLPATEEAPKVCEACKNKNDDDNDIMETLCKNDFALKIKVKEITYINRDTKIILETKSKTIYKLNGVSERDLKKSVLWLKDSLQCTCEEMNDINAPYLVMGQKQGGELVITSVKRWQKGQREFKRISRSIRKLQC

SEQ ID NO: 12164 - protein, 346 aa, Homo Sapiens
MFLSILVALCLWLHLALGVRGAPCEAVRIPMCRHMPWNITRMPNHLHHSTQENAILAIEQYEELVDVNCSAVLRFFLCAMYAPICTLEFLHDPIKPCKSVCQRARDDCEPLMKMYNHSWPESLACDELPVYDRGVCISPEAIVTDLPEDVKWIDITPDMMVQERPLDVDCKRLSPDRCKCKKVKPTLATYLSKNYSYVIHAKIKAVQRSGCNEVTTVVDVKEIFKSSSPIPRTQVPLITNSSCQCPHILPHQDVLIMCYEWRSRMMLLENCLVEKWRDQLSKRSIQWEERLQEQRRTVQDKKKTAGRTSRSNPPKPKGKPPAPKPASPKKNIKTRSAQKRTNPKRV

SEQ ID NO: 12165 - protein, 137 aa, Homo Sapiens
MQLEQSIIPDIPAKDVKWIDITPDMMVQERPLDVDCKRLSPDRCKCKKVKPTLATYLSKNYSYVIHAKIKAVQRSGCNEVTTVVDVKEIFKSSSPIPRTQVPLITNSSCQCPHILPHQDVLIMCYEWRSRMMLLENC

SEQ ID NO: 12166 - protein, 317 aa, Homo Sapiens
MRAAAAGGGVRTAALALLLGALHWAPARCEEYDYYGWQAEPLHGRSYSKPPQCLDIPADLPLCHTVGYKRMRLPNLLEHESLAEVKQQASSWLPLLAKRCHSDTQVFLCSLFAPVCLDRPIYPCRSLCEAVRAGCAPLMEAYGFPWPEMLHCHKFPLDNDLCIAVQFGHLPATAPPVTKICAQCEMEHSADGLMEQMCSSDFVVKMRIKEIKIENGDRKLIGAQKKKKLLKPGPLKRKDTKRLVLHMKNGAGCPCPQLDSLAGSFLVMGRKVDGQLLLMAVYRWDKKNKEMKFAVKFMFSYPCSLYYPFFYGAAEPH

SEQ ID NO: 12167 - protein, 78 aa, Homo Sapiens
MGSGLPLVLLLTLLGSSHGTGPGMTLQLKLKESFLTNSSYESSFLELLEKLCLLLHLPSGTSVTLHHARSQHHVVCNT

SEQ ID NO: 12168 - protein, 55 aa, Homo Sapiens
MTLQLKLKESFLTNSSYESSFLELLEKLCLLLHLPSGTSVTLHHARSQHHVVCNT

SEQ ID NO: 12169 - protein, 263 aa, Homo Sapiens
MRPCQVPGAATGPRAMWLCPLALNLILMAASGAVCEVKDVCVGSPGIPGTPGSHGLPGRDGRDGLKGDPGPPGPMGPPGEMPCPPGNDGLPGAPGIPGECGEKGEPGERGPPGLPAHLDEELQATLHDFRHQILQTRGALSLQGSIMTVGEKVFSSNGQSITFDAIQEACARAGGRIAVPRNPEENEAIASFVKKYNTYAYVGLTEGPSPGDFRYSDGTPVNYTNWYRGEPAGRGKEQCVEMYTDGQWNDRNCLYSRLTICEF

SEQ ID NO: 12170 - protein, 158 aa, Homo Sapiens
MWLCPLALNLILMAASGAVCEVKDVCVGSPGIPGTPGSHGLPGRDGRDGLKGDPGPPGPMGPPGEMPCPPGNDGLPGAPGIPGECGEKGEPGERGPPGLPAHLDEELQATLHDFRHQILQTRGALSLQGSIMTVGEKVFSSNGQSITFDAIQEACARA

SEQ ID NO: 12171 - protein, 158 aa, Homo Sapiens; identical to SEQ ID NO: 12170

SEQ ID NO: 12172 - protein, 248 aa, Homo Sapiens
MWLCPLALNLILMAASGAVCEVKDVCVGSPGIPGTPGSHGLPGRDGRDGLKGDPGPPGPMGPPGEMPCPPGNDGLPGAPGIPGECGEKGEPGERGPPGLPAHLDEELQATLHDFRHQILQTRGALSLQGSIMTVGEKVFSSNGQSITFDAIQEACARAGGRIAVPRNPEENEAIASFVKKYNTYAYVGLTEGPSPGDFRYSDGTPVNYTNWYRGEPAGRGKEQCVEMYTDGQWNDRNCLYSRLTICEF

SEQ ID NO: 12173 - protein, 248 aa, Homo Sapiens; identical to SEQ ID NO: 12172

SEQ ID NO: 12174 - protein, 38 aa, Homo Sapiens
MRPCQVPGAATGPRAMWLCPLALTLILMAASGAACEVK

SEQ ID NO: 12175 - protein, 98 aa, Homo Sapiens
MWLCPLALTLILMAASGAACEVKDVCVGSPGIPGTPGSHGLPGRDGRDGVKGDPGPPGPMGPPGETPCPPGNNGLPGAPGVPGERGEKGEAGERGPPG

SEQ ID NO: 12176 - protein, 158 aa, Homo Sapiens
MWLCPLALTLILMAASGAACEVKDVCVGSPGIPGTPGSHGLPGRDGRDGVKGDPGPPGPMGPPGETPCPPGNNGLPGAPGVPGERGEKGEAGERGPPGLPAHLDEELQATLHDFRHQILQTRGALSLQGSIMTVGEKVFSSNGQSITFDAIQEACARA

SEQ ID NO: 12177 - protein, 248 aa, Homo Sapiens
MWLCPLALTLILMAASGAACEVKDVCVGSPGIPGTPGSHGLPGRDGRDGVKGDPGPPGPMGPPGETPCPPGNNGLPGAPGVPGERGEKGEAGERGPPGLPAHLDEELQATLHDFRHQILQTRGALSLQGSIMTVGEKVFSSNGQSITFDAIQEACARAGGRIAVPRNPEENEAIASFVKKYNTYAYVGLTEGPSPGDFRYSDGTPVNYTNWYRGEPAGRGKEQCVEMYTDGQWNDRNCLYSRLTICEF

SEQ ID NO: 12178 - protein, 248 aa, Homo Sapiens; identical to SEQ ID NO: 12177

SEQ ID NO: 12179 - protein, 381 aa, Homo Sapiens
MAESHLLQWLLLLLPTLCGPGTAAWTTSSLACAQGPEFWCQSLEQALQCRALGHCLQEVWGHVGADDLCQECEDIVHILNKMAKEAIFQDTMRKFLEQECNVLPLKLLMPQCNQVLDDYFPLVIDYFQNQTDSNGICMHLGLCKSRQPEPEQEPGMSDPLPKPLRDPLPDPLLDKLVLPVLPGALQARPGPHTQDLSEQQFPIPLPYCWLCRALIKRIQAMIPKGALAVAVAQVCRVVPLVAGGICQCLAERYSVILLDTLLGRMLPQLVCRLVLRCSMDDSAGPRSPTGEWLPRDSECHLCMSVTTQAGNSSEQAIPQAMLQACVGSWLDREKCKQFVEQHTPQLLTLVPRGWDAHTTCQALGVCGTMSSPLQCIHSPDL

SEQ ID NO: 12180 - protein, 381 aa, Homo Sapiens; identical to SEQ ID NO: 12179

SEQ ID NO: 12181 - protein, 393 aa, Homo Sapiens
MHQAGYPGCRGAMAESHLLQWLLLLLPTLCGPGTAAWTTSSLACAQGPEFWCQSLEQALQCRALGHCLQEVWGHVGADDLCQECEDIVHILNKMAKEAIFQDTMRKFLEQECNVLPLKLLMPQCNQVLDDYFPLVIDYFQNQTDSNGICMHLGLCKSRQPEPEQEPGMSDPLPKPLRDPLPDPLLDKLVLPVLPGALQARPGPHTQDLSEQQFPIPLPYCWLCRALIKRIQAMIPKGALAVAVAQVCRVVPLVAGGICQCLAERYSVILLDTLLGRMLPQLVCRLVLRCSMDDSAGPRSPTGEWLPRDSECHLCMSVTTQAGNSSEQAIPQAMLQACVGSWLDREKCKQFVEQHTPQLLTLVPRGWDAHTTCQALGVCGTMSSPLQCIHSPDL

SEQ ID NO: 12182 - protein, 92 aa, Homo Sapiens
  misc_feature (1)..(1): Xaa can be any naturally occurring amino acid
XEWLPRDSECHLCMSVTTQAGNSSEQAIPQAMLQACVGSWLDREKCKQFVEQHTPQLLTLVPRGWDAHTTCQALGVCGTMSSPLQCIHSPDL

SEQ ID NO: 12183 - protein, 374 aa, Homo Sapiens
  misc_feature (1)..(1): Xaa can be any naturally occurring amino acid
XHLLQWLLLLLPTLCGPGTAAWTTSSLACAQGPEFWCQSLEQALQCRALGHCLQEVWGHVGADDLCQECEDIVHILNKMAKEAIFQDTMRKFLEQECNVLPLKLLMPQCNQVLDDYFPLVIDYFQNQTDSNGICMHLGLCKSRQPEPEQEPGMSDPLPKPLRDPLPDPLLDKLVLPVLPGALQARPGPHTQDLSEQQFPIPLPYCWLCRALIKRIQAMIPKGALAVAVAQVCRVVPLVAGGICQCLAERYSVILLDTLLGRMLPQLVCRLVLRCSMDDSAGPREWLPRDSECHLCMSVTTQAGNSSEQAIPQAMLQACVGSWLDREKCKQFVEQHTPQLLTLVPRGWDAHTTCQALGVCGTMSSPLQCIHSPDL

SEQ ID NO: 12184 - protein, 218 aa, Homo Sapiens
MFLSTSKHGRQEAMLLFLLSALVLLTQPLGYLEAEMKTYSHRTMPSACTLVMCSSVESGLPGRDGRDGREGPRGEKGDPGLPGAAGQAGMPGQAGPVGPKGDNGSVGEPGPKGDTGPSGPPGPPGVPGPAGREGPLGKQGNIGPQGKPGPKGEAGPKGEVGAPGMQGSAGARGLAGPKGERGVPGERGVPGNTGAAGSAGAMGPQGSPGARGPPGLKG

SEQ ID NO: 12185 - protein, 375 aa, Homo Sapiens
MLLFLLSALVLLTQPLGYLEAEMKTYSHRTMPSACTLVMCSSVESGLPGRDGRDGREGPRGEKGDPGLPGAAGQAGMPGQAGPVGPKGDNGSVGEPGPKGDTGPSGPPGPPGVPGPAGREGPLGKQGNIGPQGKPGPKGEAGPKGEVGAPGMQGSAGARGLAGPKGERGVPGERGVPGNTGAAGSAGAMGPQGSPGARGPPGLKGDKGIPGDKGAKGESGLPDVASLRQQVEALQGQVQHLQAAFSQYKKVELFPNGQSVGEKIFKTAGFVKPFTEAQLLCTQAGGQLASPRSAAENAALQQLVVAKNEAAFLSMTDSKTEGKFTYPTGESLVYSNWAPGEPNDDGGSEDCVEIFTNGKWNDRACGEKRLVVCEF

SEQ ID NO: 12186 - protein, 88 aa, Homo Sapiens
MADTATTASAAAASAASASSDAPPFQLGKPRFQQTSFYGRFRHFLDIIDPRTLFVTEMESCTVPQAHCNPCLLGSETSQRGCAAAGGL

SEQ ID NO: 12187 - protein, 340 aa, Homo Sapiens
MADTATTASAAAASAASASSDAPPFQLGKPRFQQTSFYGRFRHFLDIIDPRTLFVTERRLREAVQLLEDYKHGTLRPGVTNEQLWSAQKIKQAILHPDTNEKIFMPFRMSGYIPFGTPIVVGLLLPNQTLASTVFWQWLNQSHNACVNYANRNATKPSPASKFIQGYLGAVISAVSIAVGLNVLVQKANKFTPATRLLIQRFVPFPAVASANICNVVLMRYGELEEGIDVLDSDGNLVGSSKIAARHALLETALTRVVLPMPILVLPPIVMSMLEKTALLQARPRLLLPVQSLVCLAAFGLALPLAISLFPQMSEIETSQLEPEIAQATSSRTVVYNKGL

SEQ ID NO: 12188 - protein, 253 aa, Homo Sapiens
MADTATTASAAAASAASASSDAPPFQLGKPRFQQTSFYGRFRHFLDIIDPRTLFVTERRLREAVQLLEDYKHGTLRPGVTNEQLWSAQKIKQAILHPDTNEKIFMPFRMSGYIPFGTPIVVGLLLPNQTLASTVFWQWLNQSHNACVNYANRNATKPSPASKFIQGYLGAVISAVSIAVGLNVLVQKANKFTPATRLLIQRFVPFPAVGRLSCRHAPGCSSLCKASCAWQPSAWPCRWPSASSRKCQRLKHPN

SEQ ID NO: 12189 - protein, 156 aa, Homo Sapiens
MADTATTASAAAASAASASSDAPPFQLGKPRFQQTSFYGRFRHFLDIIDPRTLFVTERRLREAVQLLEDYKHGTLRPGVTNEQLWSAQKIKQVIFLLGRQFRSSLAQPDTGIHCLLWLNQSHNACVNYANRNATKPSPASKFIQGYLGAVISAVSI

SEQ ID NO: 12190 - protein, 252 aa, Homo Sapiens
  misc_feature (1)..(1): Xaa can be any naturally occurring amino acid
XAASAASASSDAPPFQLGKPRFQQTSFYGRFRHFLDIIDPRTLFVTERRLREAVQLLEDYKHGTLRPGVTNEQLWSAQKIKQAILHPDTNEKIFMPFRMSGYIPFGTPIVVGLLLPNQTLASTVFWQWLNQSHNACVNYANRNATKPSPASKFIQGYLGAVISAVSIAVGLNVLVQKANKFTPATRLLIQRFVPFPAVGPAGDGADASGPAHAHPGATPDRHVHAGEIETSQLEPEIAQATSSRTVVYNKGL

SEQ ID NO: 12191 - protein, 196 aa, Homo Sapiens
LRHSSGLLSSWVTAYNRDSFDTTRQRLVLEIGDPEGPLLPYQAEFLVRSHDAEEVLPSTPASRFLSALGGLWEPGELQLLNVTSALDRGGRVPLPIEGRKEGLKRDLATSDIQMVHHCTIHGNTEELRQMAASREVPRPLSTLPMFNVHTVVPGPALTSSSLLCPHHEWHIPPADSSSWPSWNPGSKQAGRGGGVG

SEQ ID NO: 12192 - protein, 65 aa, Homo Sapiens
MAETLFWTPLLVGKLGPCSAGRPRMRGQDLGVFSWQGWGTPRPSRPRYTHLWAVSLCTPWTMRRF

SEQ ID NO: 12193 - protein, 263 aa, Homo Sapiens
MAETLFWTPLLVVLLAGLGDTEAQQTTLHPLVGRVFVHTLDHETFLSLPEHVAVPPAVHITYHAHLQGHPDLPRWLRYTQRSPHHPGFLYGSATPEDRGLQVIEVTAYNRDSFDTTRQRLVLEIGDPEGPLLPYQAEFLVRSHDAEEVLPSTPASRFLSALGGLWEPGELQLLNVTSALDRGGRVPLPIEGRKEGLKRDLATSDIQMVHHCTIHGNTEELRQMAASREVPRPLSTLPMFNVHTGERLPPRVDSAQVPLILDQH

SEQ ID NO: 12194 - protein, 298 aa, Homo Sapiens
MAETLFWTPLLVVLLAGLGDTEAQQTTLHPLVGRVFVHTLDHETFLSLPEHVAVPPAVHITYHAHLQGHPDLPRWLRYTQRSPHHPGFLYGSATPEDRGLQVIEVTAYNRDSFDTTRQRLVLEIGDPEGPLLPYQAEFLVRSHDAEEVLPSTPASRFLSALGGLWEPGELQLLNVTSALDRGGRVPLPIEGRKEGVYIKVGSASPFSTCLKMVASPDSHARCAQGQPPLLSCYDTLAPHFRVDWCNVTLAEERPGYLRHPDGPPLHHPREHRGAAADGGQPRGAPATLHPAHVQCAHR

SEQ ID NO: 12195 - protein, 387 aa, Homo Sapiens
MAETLFWTPLLVVLLAGLGDTEAQQTTLHPLVGRVFVHTLDHETFLSLPEHVAVPPAVHITYHAHLQGHPDLPRWLRYTQRSPHHPGFLYGSATPEDRGLQVIEVTAYNRDSFDTTRQRLVLEIGDPEGPLLPYQAEFLVRSHDAEEVLPSTPASRFLSALGGLWEPGELQLLNVTSALDRGGRVPLPIEGRKEGVYIKVGSASPFSTCLKMVASPDSHARCAQGQPPLLSCYDTLAPHFRVDWCNVTLVDKSVPEPADEVPTPGDGILEHDPFFCPPTEAPDRDFLVDALVTLLVPLLVALLLTLLLAYVMCCRREGRLKRDLATSDIQMVHHCTIHGNTEELRQMAASREVPRPLSTLPMFNVHTGERLPPRVDSAQVPLILDQH

SEQ ID NO: 12196 - protein, 61 aa, Homo Sapiens
MAETLFWTPLLVVLLAGLGDTEAQQTTLHPLVGRVFVHTLDHETFLSLPEHVGHSLQSGQL

SEQ ID NO: 12197 - protein, 58 aa, Homo Sapiens
  misc_feature (1)..(1): Xaa can be any naturally occurring amino acid
XCPTRCPHHLPRPPPGTPRPAPVAPLHPAQPPPPWLPLRLCHPRRSWAPGHSLQSGQL

SEQ ID NO: 12198 - protein, 160 aa, Homo Sapiens
  misc_feature (1)..(1): Xaa can be any naturally occurring amino acid
XLDRGGRVPLPIEGRKEGVYIKVDKSVPEPADEVPTPGDGILEHDPFFCPPTEAPDRDFLVDALVTLLVPLLVALLLTLLLAYVMCCRREGRLKRDLATSDIQMVHHCTIHGNTEELRQMAASREVPRPLSTLPMFNVHTGERLPPRVDSAQVPLILDQH

SEQ ID NO: 12199 - protein, 108 aa, Homo Sapiens
MSCPVPACCALLLVLGLCRARPRNALLLLADDGGFESGAYNNSAIATPHLDALARRSLLFRNAFTSVSSCSPSRASLLTGLPQAFLPLRRLPRPPPLWALPAPVRNLL

SEQ ID NO: 12200 - protein, 227 aa, Homo Sapiens
MSCPVPACCALLLVLGLCRARPRNALLLLADDGGFESGAYNNSAIATPHLDALARRSLLFRNAFTSVSSCSPSRASLLTGLPQASSGRSTWGRRPCTRLTLRTRRRMAPSSRWGGTSLELSCSSGNSCRLRMTGLSSSTSPSTTPTAVGTPSPSTEPSVRSLATERAAWVVSQTGPPRPTTHWTCWCLTSSPTPRQPEPTWPLSTPPSAAWTKELDWCSRSCVTPVS

SEQ ID NO: 12201 - protein, 502 aa, Homo Sapiens
MSCPVPACCALLLVLGLCRARPRNALLLLADDGGFESGAYNNSAIATPHLDALARRSLLFRNAFTSVSSCSPSRASLLTGLPQHQNGMYGLHQDVHHFNSFDKVRSLPLLLSQAGVRTGIIGKKHVGPETVYPFDFAYTEENGSVLQVGRNITRIKLLVRKFLQTQDDRPFFLYVAFHDPHRCGHSQPQYGTFCEKFGNGESGMGRIPDWTPQAYDPLDVLVPYFVPNTPAARADLAAQYTTVGRMDQGVGLVLQELRDAGVLNDTLVIFTSDNGIPFPSGRTNLYWPGTAEPLLVSSPEHPKRWGQVSEAYVSLLDLTPTILDWFSIPYPSYAIFGSKTIHLTGRSLLPALEAEPLWATVFGSQSHHEVTMSYPMRSVQHRHFRLVHNLNFKMPFPIDQDFYVSPTFQDLLNRTTAGQPTGWYKDLRHYYYRARWELYDRSRDPHETQNLATDPRFAQLLEMLRDQLAKWQWETHDPWVCAPDGVLEEKLSPQCQPLHNEL

SEQ ID NO: 12202 - protein, 188 aa, Homo Sapiens [sequence omitted]

SEQ ID NO: 12203 - protein, 274 aa, Homo Sapiens
MSCPVPACCALLLVLGLCRARPRNALLLLADRALSVSHLTQRMTEALRVARTTTAPSPPRTWTPWPAAASSFAMPSPRSAAALPAAPASSLACPSIRMGCTGCTRTCTTSTPSTRCGACRCCSAKLVCAQASSGRSTWGRRPCTRLTLRTRRRMAPSSRWGGTSLELSCSSGNSCRLRMTGLSSSTSPSTTPTAVGTPSPSTEPSVRSLATERAAWVVSQTGPPRPTTHWTCWCLTSSPTPRQPEPTWPLSTPPSAAWTKELDWCSRSCVTPVS

SEQ ID NO: 12204 - protein, 110 aa, Homo Sapiens
MYGLHQDVHHFNSFDKVRSLPLLLSQAGVRTGIIGKKHVGPETVYPFDFAYTEENGSVLQVGRNITRIKLLVRKFLQTQDDRPFFLYVAFHDPHRCGHSQPQYGTFCEKF

SEQ ID NO: 12205 - protein, 67 aa, Homo Sapiens
VIFTSDNGIPFPSGRTNLYWPGTAEPLLVSSPEHPKRWGQVSEAYVSLLEEKNEAQRGEVSCSGLHS

SEQ ID NO: 12206 - protein, 106 aa, Homo Sapiens
  misc_feature (1)..(1): Xaa can be any naturally occurring amino acid
XARPRNALLLLADDGGFESGAYNNSAIATPHLDALARRSLLFRNAFTSVSSCSPSRASLLTGLPQHQNGMYGLHQDVHHFNSFDKVRSLPLLLSQAGVRTGGAEHH

SEQ ID NO: 12207 - protein, 194 aa, Homo Sapiens
  misc_feature (1)..(1): Xaa can be any naturally occurring amino acid
XFDFAYTEENGSVLQVGRNITRIKLLVRKFLQTQDDRPFFLYVAFHDPHRCGHSQPQYGTFCEKFGNGESGMGRIPDWTPQAYDPLDVLVPYFVPNTPAARADLAAQYTTVGRMDQGVGLVLQELRDAGVLNDTLVIFTSDNGIPFPSGRTNLYWPGTAEPLLVSSPEHPKRWGQVSEAYVSLLVTRLLLPTVK

SEQ ID NO: 12208 - protein, 882 aa, Homo Sapiens
MLLGASWLCASKAAAAAAQSEGDEDRPGERRRRRAAATAAGAGEDMDESSLLDLLECSVCLERLDTTAKVLPCQHTFCRRCLESIVCSRHELRCPECRILVGCGVDELPANILLVRLLDGIRQRPRAGTSPGGSPPARPIPGQSAAPTLAGGGGGAAGSTPGSPVFLSAAAGSTAGSLRELATSRTAPAAKNPCLLPYGKALYSYEGKEPGDLKFNKGDIIVLRRKVDEQWYHGELHGTQGFLPASYIQCIQPLPHAPPQGKALYDFEMKDKDQDKDCLTFTKDEILTVLRRVDENWAEGMLGDKIGIFPLLYVELNDSAKQLIEMDKPCPAAASSCNASLPSDSGAVASVAPSPTLSSSGAVSAFQRRVDGKKNTKKRHSFTALSVTHRSSQAASHRHSMEISAPVLISSSDPRAAARIGDLAHLSCAAPTQDVSSSAGSTPTAVPRAASVSGEQGTPPKVQLPLNVYLALYAYKPQKSDELELHKGEMYRVLEKCQDGWFKGASLRTGVSGVFPGNYVTPVSRVPAGGAGPPRNNVVGGSPLAKGITTTMHPGSGSLSSLATATRPALPITTPQAHAQHPTASPPTGSCLRHSAQPTASQARSTISTAAHSAAQAQDRPTATVSPLRTQNSPSRLPATSLRPHSVVSPQHSHQPPVQMCPRPAIPLTSAASAITPPNVSAANLNGEAGGGPIGVLSTSSPTNTGCKLDEKKSEKKEKKSGLLKLLAGASTKKKSRSPPSVSPTHDPQVAVDALLQGAVGPEVSSLSIHGRAGSCPIESEMQGAMGMEPLHRKAGSLDLNFTSPSRQAPLSMAAIRPEPKLLPRERYRVVVSYPPQSEAEIELKEGDIVFVHKKREDGWYKGTLQRNGRTGLFPGSFVESF

SEQ ID NO: 12209 - protein, 181 aa, Homo Sapiens
MESRGPLATSRLLLLLLLLLLRHTRQGWALRPVLPTQSAHDPPAVHLSNGPGQEPIAVMTFDLTKITKTSSSFEVRTWDPEGVIFYGDTNPKDDWFMLGLRDGRPEIQLHNHWAQLTVGAAPETGLWAPDQQTPSHHEDCAWGAALPRFQPSVAAGSCPGWLPAPGFLAGQTGRDLSICPH

SEQ ID NO: 12210 - protein, 384 aa, Homo Sapiens
MESRGPLATSRLLLLLLLLLLRHTRQGWALRPVLPTQSAHDPPAVHLSNGPGQEPIAVMTFDLTKITKTSSSFEVRTWDPEGVIFYGDTNPKDDWFMLGLRDGRPEIQLHNHWAQLTVGAGPRLDDGRWHQVEVKMEGDSVLLEVDGEEVLRLRQVSGPLTSKRHPIMRIALGGLLFPASNLRLPAEISASAPTSLRSCDVESNPGIFLPPGTQAEFNLRDIPQPHAEPWAFSLDLGLKQAAGSGHLLALGTPENPSWLSLHLQDQKVVLSSGSGPGLDLPLVLGLPLQLKLSMSRVVLSQGSKMKALALPPLGLAPLLNLWAKPQGRLFLGALPGEDSSTSFCLNGLWAQGQRLDVDQALNRSHEIWTHSCPQSPGNGTDASH

SEQ ID NO: 12211 - protein, 402 aa, Homo Sapiens
MESRGPLATSRLLLLLLLLLLRHTRQGWALRPVLPTQSAHDPPAVHLSNGPGQEPIAVMTFDLTKITKTSSSFEVRTWDPEGVIFYGDTNPKDDWFMLGLRDGRPEIQLHNHWAQLTVGAGPRLDDGRWHQVEVKMEGDSVLLEVDGEEVLRLRQVSGPLTSKRHPIMRIALGGLLFPASNLRLPLVPALDGCLRRDSWLDKQAEISASAPTSLRSCDVESNPGIFLPPGTQAEFNLRDIPQPHAEPWAFSLDLGLKQAAGSGHLLALGTPENPSWLSLHLQDQKVVLSSGSGPGLDLPLVLGLPLQLKLSMSRVVLSQGSKMKALALPPLGLAPLLNLWAKPQGRLFLGALPGEDSSTSFCLNGLWAQGQRLDVDQALNRSHEIWTHSCPQSPGNGTDASH

SEQ ID NO: 12212 - protein, 293 aa, Homo Sapiens
MESRGPLATSRLLLLLLLLLLRHTRQGWALRPVLPTQSAHDPPAVHLSNGPGQEPIAVMTFDLTKITKTSSSFEVRTWDPEGVIFYGDTNPKDDWFMLGLRDGRPEIQLHNHWAQLTVGAGPRLDDGRWHQVEVKMEGDSVLLEVDGEEVLRLRQVSGPLTSKRHPIMRIALGGLLFPASNLRLPLVPALDGCLRRDSWLDKQAEISASAPTSLRSCDVESNPGIFLPPGTQAEFNLRDIPQPHAEPWAFSLDLGLKQAAGSGHLLALGTPENPSWLSLHLQDQEKTLPPLFA

SEQ ID NO: 12213 - protein, 287 aa, Homo Sapiens
MESRGPLATSRLLLLLLLLLLRHTRQGWALRPVLPTQSAHDPPAVHLSNGPGQEPIAVMTFDLTKITKTSSSFEVRTWDPEGVIFYGDTNPKDDWFMLGLRDGRPEIQLHNHWAQLTVGAGPRLDDGRWHQVEVKMEGDSVLLEVDGEEVLRLRQVSGPLTSKRHPIMRIALGGLLFPASNLRLPLVPALDGCLRRDSWLDKQAEISASAPTSLRSCDVESNPGIFLPPGTQAEFNLRGEDSSTSFCLNGLWAQGQRLDVDQALNRSHEIWTHSCPQSPGNGTDASH

SEQ ID NO: 12214 - protein, 57 aa, Homo Sapiens
MESRGPLATSRLLLLLLLLLLRHTRQGWALRPVLPTQVQERDRALSSCSLPFSPLAL

SEQ ID NO: 12215 - protein, 82 aa, Homo Sapiens
MTFDLTKITKTSSSFEVRTWDPEGVIFYGDTNPKDDWFMLGLRDGRPEIQLHNHWAQLTVGAGPRLDDGRWHQEKTLPPLFA

SEQ ID NO: 12216 - protein, 181 aa, Homo Sapiens
MTFDLTKITKTSSSFEVRTWDPEGVIFYGDTNPKDDWFMLGLRDGRPEIQLHNHWAQLTVGAGPRLDDGRWHQLVPALDGCLRRDSWLDKQAEISASAPTSLRSCDVESNPGIFLPPGTQAEFNLRDIPQPHAEPWAFSLDLGLKQAAGSGHLLALGTPENPSWLSLHLQDQEKTLPPLFA

SEQ ID NO: 12217 - protein, 290 aa, Homo Sapiens
MTFDLTKITKTSSSFEVRTWDPEGVIFYGDTNPKDDWFMLGLRDGRPEIQLHNHWAQLTVGAGPRLDDGRWHQLVPALDGCLRRDSWLDKQAEISASAPTSLRSCDVESNPGIFLPPGTQAEFNLRDIPQPHAEPWAFSLDLGLKQAAGSGHLLALGTPENPSWLSLHLQDQKVVLSSGSGPGLDLPLVLGLPLQLKLSMSRVVLSQGSKMKALALPPLGLAPLLNLWAKPQGRLFLGALPGEDSSTSFCLNGLWAQGQRLDVDQALNRSHEIWTHSCPQSPGNGTDASH

SEQ ID NO: 12218 - protein, 175 aa, Homo Sapiens
MTFDLTKITKTSSSFEVRTWDPEGVIFYGDTNPKDDWFMLGLRDGRPEIQLHNHWAQLTVGAGPRLDDGRWHQLVPALDGCLRRDSWLDKQAEISASAPTSLRSCDVESNPGIFLPPGTQAEFNLRGEDSSTSFCLNGLWAQGQRLDVDQALNRSHEIWTHSCPQSPGNGTDASH

SEQ ID NO: 12219 - protein, 93 aa, Homo Sapiens
MTFDLTKITKTSSSFEVRTWDPEGVIFYGDTNPKDDWFMLGLRDGRPEIQLHNHWAQLTVGAGPRLDDGRWHQVEVKMEGDSVLLEVDGEEVL

SEQ ID NO: 12220 - protein, 235 aa, Homo Sapiens
MTFDLTKITKTSSSFEVRTWDPEGVIFYGDTNPKDDWFMLGLRDGRPEIQLHNHWAQLTVGAGPRLDDGRWHQVEVKMEGDSVLLEVDGEEVLRLRQVSGPLTSKRHPIMRIALGGLLFPASNLRLPLVPALDGCLRRDSWLDKQAEISASAPTSLRSCDVESNPGIFLPPGTQAEFNLRDIPQPHAEPWAFSLDLGLKQAAGSGHLLALGTPENPSWLSLHLQDQEKTLPPLFA

SEQ ID NO: 12221 - protein, 344 aa, Homo Sapiens
MTFDLTKITKTSSSFEVRTWDPEGVIFYGDTNPKDDWFMLGLRDGRPEIQLHNHWAQLTVGAGPRLDDGRWHQVEVKMEGDSVLLEVDGEEVLRLRQVSGPLTSKRHPIMRIALGGLLFPASNLRLPLVPALDGCLRRDSWLDKQAEISASAPTSLRSCDVESNPGIFLPPGTQAEFNLRDIPQPHAEPWAFSLDLGLKQAAGSGHLLALGTPENPSWLSLHLQDQKVVLSSGSGPGLDLPLVLGLPLQLKLSMSRVVLSQGSKMKALALPPLGLAPLLNLWAKPQGRLFLGALPGEDSSTSFCLNGLWAQGQRLDVDQALNRSHEIWTHSCPQSPGNGTDASH

SEQ ID NO: 12222 - protein, 344 aa, Homo Sapiens; identical to SEQ ID NO: 12221

SEQ ID NO: 12223 - protein, 229 aa, Homo Sapiens
MTFDLTKITKTSSSFEVRTWDPEGVIFYGDTNPKDDWFMLGLRDGRPEIQLHNHWAQLTVGAGPRLDDGRWHQVEVKMEGDSVLLEVDGEEVLRLRQVSGPLTSKRHPIMRIALGGLLFPASNLRLPLVPALDGCLRRDSWLDKQAEISASAPTSLRSCDVESNPGIFLPPGTQAEFNLRGEDSSTSFCLNGLWAQGQRLDVDQALNRSHEIWTHSCPQSPGNGTDASH

SEQ ID NO: 12224 - protein, 113 aa, Homo Sapiens
WALRPVLPTQSAHDPPAVHLSNGPGQEPIAVMTFDLTKITKTSSSFEVRTWDPEGVIFYGDTNPKDDWFMLGLRDGRPEIQLHNHWAQLTVGAGPRLDDGRWHQEKTLPPLFA

SEQ ID NO: 12225 - protein, 212 aa, Homo Sapiens
WALRPVLPTQSAHDPPAVHLSNGPGQEPIAVMTFDLTKITKTSSSFEVRTWDPEGVIFYGDTNPKDDWFMLGLRDGRPEIQLHNHWAQLTVGAGPRLDDGRWHQLVPALDGCLRRDSWLDKQAEISASAPTSLRSCDVESNPGIFLPPGTQAEFNLRDIPQPHAEPWAFSLDLGLKQAAGSGHLLALGTPENPSWLSLHLQDQEKTLPPLFA

SEQ ID NO: 12226 - protein, 206 aa, Homo Sapiens
WALRPVLPTQSAHDPPAVHLSNGPGQEPIAVMTFDLTKITKTSSSFEVRTWDPEGVIFYGDTNPKDDWFMLGLRDGRPEIQLHNHWAQLTVGAGPRLDDGRWHQLVPALDGCLRRDSWLDKQAEISASAPTSLRSCDVESNPGIFLPPGTQAEFNLRGEDSSTSFCLNGLWAQGQRLDVDQALNRSHEIWTHSCPQSPGNGTDASH

SEQ ID NO: 12227 - protein, 260 aa, Homo Sapiens
WALRPVLPTQSAHDPPAVHLSNGPGQEPIAVMTFDLTKITKTSSSFEVRTWDPEGVIFYGDTNPKDDWFMLGLRDGRPEIQLHNHWAQLTVGAGPRLDDGRWHQVEVKMEGDSVLLEVDGEEVLRLRQVSGPLTSKRHPIMRIALGGLLFPASNLRLPLVPALDGCLRRDSWLDKQAEISASAPTSLRSCDVESNPGIFLPPGTQAEFNLRGEDSSTSFCLNGLWAQGQRLDVDQALNRSHEIWTHSCPQSPGNGTDASH

SEQ ID NO: 12228 - protein, 495 aa, Homo Sapiens
MQWSPTPGASACLGWASSLACSTAPTLLGRAGRGPLMAAKWFKEFPLNLKTVSERAKPGGGGGKLRKNSEAGGAGPGPGKGRKNSAAELGSGRAGVGPKDSRLSRDSLQGLIQAAAGKGRKNSRATEEEPHRGATKSSGCSTYINRLIKVDTQEKNGKSNYPSSSSSSSSSSSSASSSPSSLGPELDKGKIIKQQETVIILEDYADPYDAKRTKGQRDAERVGENDGYMEPYDAQQMITEIRRRGSKDPLVKALQLLDSPCEPADGGLKSETLAKRRSSKDLLGKPPQLYDTPYEPAEGGPRAEGKARPPDSRLPENDERPAAEYEQPWEWKKEQIVRALSVQFEGAERPSFREETVRQHHRQKSWTQKILKPALSDHSEGEKVDPGLPLEKQPWYHGAISRAEAESRLQPCKEAGYLVRNSESGNSRYSIALKTSQGCVHIIVAQTKDNKYTLNQTSAVFDSIPEVVHYYSNEKLPFKGAEHMTLLYPVHSKLH

SEQ ID NO: 12229 - protein, 132 aa, Homo Sapiens
  misc_feature (1)..(1): Xaa can be any naturally occurring amino acid
XEGKARPPDSRLPENDERPAAEYEQPWEWKKEQIVRALSVQFEGAERPSFREETVRQHHRQKSWTQKILKPALSDHSEGEKVDPGLPLEKQPWYHGAISRAEAESRLQPCKEAGYLVRNSESGNSRYSIALK

SEQ ID NO: 12230 - protein, 41 aa, Homo Sapiens
  misc_feature (1)..(1): Xaa can be any naturally occurring amino acid
XSRAEAESRLQPCKEAGYLVRNSESGNSRYSIALKNHHLLS

SEQ ID NO: 12231 - protein, 462 aa, Homo Sapiens
MLLLARCLLLVLVSSLLVCSGLACGPGRGFGKRRHPKKLTPLAYKQFIPNVAEKTLGASGRYEGKISRNSERFKELTPNYNPDIIFKDEENTGADRLMTQRCKDKLNALAISVMNQWPGVKLRVTEGWDEDGHHSEESLHYEGRAVDITTSDRDRSKYGMLARLAVEAGFDWVYYESKAHIHCSVKAENSVAAKSGGCFPGSATVHLEQGGTKLVKDLSPGDRVLAADDQGRLLYSDFLTFLDRDDGAKKVFYVIETREPRERLLLTAAHLLFVAPHNDSATGEPEASSGSGPPSGGALGPRALFASRVRPGQRVYVVAERDGDRRLLPAAVHSVTLSEEAAGAYAPLTAQGTILINRVLASCYAVIEEHSWAHRAFAPFRLAHALLAALAPARTDRGGDSGGGDRGGGGGRVALTAPGAADAPGAGATAGIHWYSQLLYQIGTWLLDSEALHPLGMAVKSS

SEQ ID NO: 12232 - protein, 126 aa, Homo Sapiens
MLSLFPSPGPGSSRCKDKLNALAISVMNQWPGVKLRVTEGWDEDGHHSEESLHYEGRAVDITTSDRDRSKYGMLARLAVEAGFDWVYYESKAHIHCSVKAGGQQVPGWCLQSRRKCDGFCSFDSSV

SEQ ID NO: 12233 - protein, 169 aa, Homo Sapiens
MLSLFPSPGPGSSRCKDKLNALAISVMNQWPGVKLRVTEGWDEDGHHSEESLHYEGRAVDITTSDRDRSKYGMLARLAVEAGFDWVYYESKAHIHCSVKAGKERKPLLRDTRYRASRGCSPAPPGRGADFSFRVDGAKSLCKMYAWWLLPASLMTKCISIPVKTCITMY

SEQ ID NO: 12234 - protein, 123 aa, Homo Sapiens
MLSLFPSPGPGSSRCKDKLNALAISVMNQWPGVKLRVTEGWDEDGHHSEESLHYEGRAVDITTSDRDRSKYGMLARLAVEAGFDWVYYESKAHIHCSVKAVQSDFKSVESEPEAPGTAAPLAV

SEQ ID NO: 12235 - protein, 262 aa, Homo Sapiens
KFPLRMKDNDLLVSELYRDPAEDGVTALSVYLTPKTSDSGNWIEIAYGTSSGGVRVIVQHPETVGSGPQLFQTFTVHRSPVTKIMLSEKHLISVCADNNHVRTWSVTRFRGMISTQPGSTPLASFKILALESADGHGGCSAGNDIGGLTEQELMEQLEHCELAPPAPSAPSWGCLPSPSPRISLTSLHSASSNTSLSGHRGSPSPPQAEARRRGGGSFVERCQELVRSGPDLRRPPTPAPWPSSGLGTPLTPPKMKLNETSF

SEQ ID NO: 12236 - protein, 141 aa, Homo Sapiens
MAAAATAAEGVPSRGPPGEVIHLNVGGKRFSTSRQTLTWIPDSFFSSLLSGRISTLKDETGAIFIDRDPTVFAPILNFLRTKELDPRGVHGSSLLHEAQFYGLTPLVLLLQFVACSFERSWIDLLVETSSSMVTCRHQCSQ

SEQ ID NO: 12237 - protein, 707 aa, Homo Sapiens
MAAAATAAEGVPSRGPPGEVIHLNVGGKRFSTSRQTLTWIPDSFFSSLLSGRISTLKDETGAIFIDRDPTVFAPILNFLRTKELDPRGVHGSSLLHEAQFYGLTPLVRRLQLREELDRSSCGNVLFNGYLPPPVFPVKRRNRHSLVGPQQLGGRPAPVRRSNTMPPNLGNAGLLGRMLDEKTPPSPSGQPEEPGMVRLVCGHHNWIAVAYTQFLVCYRLKEASGWQLVFSSPRLDWPIERLALTARVHGGALGEHDKMVAAATGSEILLWALQAEGGGSEIGVFHLGVPVEALFFVGNQLIATSHTGRIGVWNAVTKHWQVQEVQPITSYDAAGSFLLLGCNNGSIYYVDVQKFPLRMKDNDLLVSELYRDPAEDGVTALSVYLTPKTSDSGNWIEIAYGTSSGGVRVIVQHPETVGSGPQLFQTFTVHRSPVTKIMLSEKHLISVCADNNHVRTWSVTRFRGMISTQPGSTPLASFKILALESADGHGGCSAGNDIGPYGERDDQQVFIQKVVPSASQLFVRLSSTGQRVCSVRSVDGSPTTAFTVLECEGSRRLGSRPRRYLLTGQANGSLAMWDLTTAMDGLGQAPAGGLTEQELMEQLEHCELAPPAPSAPSWGCLPSPSPRISLTSLHSASSNTSLSGHRGSPSPPQAEARRRGGGSFVERCQELVRSGPDLRRPPTPAPWPSSGLGTPLTPPKMKLNETSF

SEQ ID NO: 12238 - protein, 682 aa, Homo Sapiens
MAAAATAAEGVPSRGPPGEVIHLNVGGKRFSTSRQTLTWIPDSFFSSLLSGRISTLKDETGAIFIDRDPTVFAPILNFLRTKELDPRGVHGSSLLHEAQFYGLTPLVRRLQLREELDRSSCGNVLFNGYLPPPVFPVKRRNRHSLVGPQQLGGRPAPVRRSNTMPPNLGNAGLLGRMLDEKTPPSPSGQPEEPGMVRLVCGHHNWIAVAYTQFLVCYRLKEASGWQLVFSSPRLDWPIERLALTARVHGGALGEHDKMVAAATGSEILLWALQAEGGGSEIGRIGVWNAVTKHWQVQEVQPITSYDAAGSFLLLGCNNGSIYYVDVQKFPLRMKDNDLLVSELYRDPAEDGVTALSVYLTPKTSDSGNWIEIAYGTSSGGVRVIVQHPETVGSGPQLFQTFTVHRSPVTKIMLSEKHLISVCADNNHVRTWSVTRFRGMISTQPGSTPLASFKILALESADGHGGCSAGNDIGPYGERDDQQVFIQKVVPSASQLFVRLSSTGQRVCSVRSVDGSPTTAFTVLECEGSRRLGSRPRRYLLTGQANGSLAMWDLTTAMDGLGQAPAGGLTEQELMEQLEHCELAPPAPSAPSWGCLPSPSPRISLTSLHSASSNTSLSGHRGSPSPPQAEARRRGGGSFVERCQELVRSGPDLRRPPTPAPWPSSGLGTPLTPPKMKLNETSF

SEQ ID NO: 12239 - protein, 102 aa, Homo Sapiens
MAAAATAAEGVPSRGPPGEVIHLNVGGKRFSTSRQTLTWIPDSFFSSLLSGRISTLKDETGAIFIDRDPTVFAPILNFLRTKELDPRLAWKKGRESLTVFSP

SEQ ID NO: 12240 - protein, 88 aa, Homo Sapiens
MAAAATAAEGVPSRGPPGEVIHLNVGGKRFSTSRQTLTWIPDSFFSSLLSGRISTLKDETGAIFIDRDPTVFAPILNFLRTKELDPRP

SEQ ID NO: 12241 - protein, 37 aa, Homo Sapiens
MRPEQSSSTGTLQSSPPSSTSCAPKSWIPAFSVHPHT

SEQ ID NO: 12242 - protein, 131 aa, Homo Sapiens
MRPEQSSSTGTLQSSPPSSTSCAPKSWIPVRRLQLREELDRSSCGNVLFNGYLPPPVFPVKRRNRHSLVGPQQLGGRPAPVRRSNTMPPNLGNAGLLGRMLDEKTPPSPSGQPEEPGMVRLVCGHHNWIAV

SEQ ID NO: 12243 - protein, 277 aa, Homo Sapiens
RSPVTKIMLSEKHLISVCADNNHVRTWSVTRFRGMISTQPGSTPLASFKILALESADGHGGCSAGNDIGPYGERDDQQVFIQKVVPSASQLFVRLSSTGQRVCSVRSVDGSPTTAFTVLECEGSRRLGSRPRRYLLTGQANGSLAMWDLTTAMDGLGQAPGGLTEQELMEQLEHCELAPPAPSAPSWGCLPSPSPRISLTSLHSASSNTSLSGHRGSPSPPQAEARRRGGGSFVERCQELVRSGPDLRRPPTPAPWPSSGLGTPLTPPKMKLNETSF

SEQ ID NO: 12244 - protein, 610 aa, Homo Sapiens
  misc_feature (1)..(1): Xaa can be any naturally occurring amino acid
XAAEGVPSRGPPGEVIHLNVGGKRFSTSRQTLTWIPDSFFSSLLSGRISTLKDETGAIFIDRDPTVFAPILNFLRTKELDPRGVHGSSLLHEAQFYGLTPLVRRLQLREELDRSSCGNVLFNGYLPPPVFPVKRRNRHSLVGPQQLGGRPAPVRRSNTMPPNLGNAGLLGRMLDEKTPPSPSGQPEEPGMVRLVCGHHNWIAVAYTQFLVCYRLKEASGWQLVFSSPRLDWPIERLALTARVHGGALGEHDKMVAAATGSEILLWALQAEGGGSEIGVFHLGVPVEALFFVGNQLIATSHTGRIGVWNAVTKHWQVQEVQPITSYDAAGSFLLLGCNNGSIYYVDVQKFPLRMKDNDLLVSELYRDPAEDGVTALSVYLTPKTSDSGNWIEIAYGTSSGGVRVIVQHPETVGSGPQLFQTFTVHRSPVTKIMLSEKHLISVCADNNHVRTWSVTRFRGMISTQPGSTPLASFKILALESADGHGGCSAGNDIAGGLTEQELMEQLEHCELAPPAPSAPSWGCLPSPSPRISLTSLHSASSNTSLSGHRGSPSPPQAEARRRGGGSFVERCQELVRSGPDLRRPPTPAPWPSSGLGTPLTPPKMKLNETSF

SEQ ID NO: 12245 - protein, 175 aa, Homo Sapiens
  misc_feature (1)..(1): Xaa can be any naturally occurring amino acid
XDSGNWIEIAYGTSSGGVRVIVQHPETVGSGPQLFQTFTVHRSPVTKIMLSEKHLISAGGLTEQELMEQLEHCELAPPAPSAPSWGCLPSPSPRISLTSLHSASSNTSLSGHRGSPSPPQAEARRRGGGSFVERCQELVRSGPDLRRPPTPAPWPSSGLGTPLTPPKMKLNETSF

SEQ ID NO: 12246 - protein, 250 aa, Homo Sapiens
  misc_feature (1)..(1): Xaa can be any naturally occurring amino acid
XELYRDPAEDGVTALSVYLTPKTSDSGNWIEIAYGTSSGGVRVIVQHPETVGSGPQLFQTFTVHRSPVTKIMLSEKHLISVCADNNHVRTWSVTRFRGMISTQPGSTPLASFKILALESADGHGGCSAGNDIAGGLTEQELMEQLEHCELAPPAPSAPSWGCLPSPSPRISLTSLHSASSNTSLSGHRGSPSPPQAEARRRGGGSFVERCQELVRSGPDLRRPPTPAPWPSSGLGTPLTPPKMKLNETSF

SEQ ID NO: 12247 - protein, 129 aa, Homo Sapiens
  misc_feature (1)..(1): Xaa can be any naturally occurring amino acid
XGSGPQLFQTFTVHRSPVTKIMLSEKHLISVCADNNHVRTWSVTRFRGMISTQPGSTPLASFKILALESADGHGGCSAGNDIGPYGERDDQQVFIQKVVPSASQLFVRLSSTGQRWPDGARADGTAGTL

SEQ ID NO: 12248 - protein, 299 aa, Homo Sapiens
  misc_feature (1)..(1): Xaa can be any naturally occurring amino acid
XGSIYYVDVQKFPLRMKDNDLLVSELYRDPAEDGVTALSVYLTPKTICADNNHVRTWSVTRFRGMISTQPGSTPLASFKILALESADGHGGCSAGNDIGPYGERDDQQVFIQKVVPSASQLFVRLSSTGQRVCSVRSVDGSPTTAFTVLECEGSRRLGSRPRRYLLTGQANGSLAMWDLTTAMDGLGQAPAGGLTEQELMEQLEHCELAPPAPSAPSWGCLPSPSPRISLTSLHSASSNTSLSGHRGSPSPPQAEARRRGGGSFVERCQELVRSGPDLRRPPTPAPWPSSGLGTPLTPP

SEQ ID NO: 12249 - protein, 164 aa, Homo Sapiens
  misc_feature (1)..(1): Xaa can be any naturally occurring amino acid
XQMGMAAAVLAMTLAPTVSGTTSKCSSRRWCPVPASSSCVSHLLGSAGGLTEQELMEQLEHCELAPPAPSAPSWGCLPSPSPRISLTSLHSASSNTSLSGHRGSPSPPQAEARRRGGGSFVERCQELVRSGPDLRRPPTPAPWPSSGLGTPLTPPKMKLNETSF

SEQ ID NO: 12250 - protein, 143 aa, Homo Sapiens
  misc_feature (1)..(1): Xaa can be any naturally occurring amino acid
XTSKCSSRRWCPVPASSSCVSHLLGSGGLTEQELMEQLEHCELAPPAPSAPSWGCLPSPSPRISLTSLHSASSNTSLSGHRGSPSPPQAEARRRGGGSFVERCQELVRSGPDLRRPPTPAPWPSSGLGTPLTPPKMKLNETSF

SEQ ID NO: 12251 - protein, 523 aa, Homo Sapiens
MVAPGLVLGLVLPLILWADRSAGIGFRFASYINNDMVLQKEPAGAVIWGFGTPGATVTVTLRQGQETIMKKVTSVKAHSDTWMVVLDPMKPGGPFEVMAQQTLEKINFTLRVHDVLFGDVWLCSGQSNMQMTVLQIFNATRELSNTAAYQSVRILSVSPIQAEQELEDLVAVDLQWSKPTSENLGHGYFKYMSAVCWLFGRHLYDTLQYPIGLIASSWGGTPIEAWSSGRSLKACGVPKQGSIPYDSVTGPSKHSVLWNAMIHPLCNMTLKGVVWYQGESNINYNTDLYNCTFPALIEDWRETFHRGSQGQTERFFPFGLVQLSSDLSKKSSDDGFPQIRWHQTADFGYVPNPKMPNTFMAVAMDLCDRDSPFGSIHPRDKQTVAYRLHLGARALAYGEKNLTFEGPLPEKIELLAHKGLLNLTYYQQIQVQKKDNKIFEISCCSDHRCKWLPASMNTVSTQSLTLAIDSCHGTVVALRYAWTTWPCEYKQCPLYHPSSALPAPPFIAFITDQGPGHQSNVAK

SEQ ID NO: 12252 - protein, 488 aa, Homo Sapiens
MVLQKEPAGAVIWGFGTPGATVTVTLRQGQETIMKKVTSVKAHSDTWMVVLDPMKPGGPFEVMAQQTLEKINFTLRVHDVLFGDVWLCSGQSNMQMTVLQIFNATRELSNTAAYQSVRILSVSPIQAEQELEDLVAVDLQWSKPTSENLGHGYFKYMSAVCWLFGRHLYDTLQYPIGLIASSWGGTPIEAWSSGRSLKACGVPKQGSIPYDSVTGPSKHSVLWNAMIHPLCNMTLKGVVWYQGESNINYNTDLYNCTFPALIEDWRETFHRGSQGQTERFFPFGLVQLSSDLSKKSSDDGFPQIRWHQTADFGYVPNPKMPNTFMAVAMDLCDRDSPFGSIHPRDKQTVAYRLHLGARALAYGEKNLTFEGPLPEKIELLAHKGLLNLTYYQQIQVQKKDNKIFEISCCSDHRCKWLPASMNTVSTQSLTLAIDSCHGTVVALRYAWTTWPCEYKQCPLYHPSSALPAPPFIAFITDQGPGHQSNVAK

SEQ ID NO: 12253 - protein, 488 aa, Homo Sapiens; identical to SEQ ID NO: 12252

SEQ ID NO: 12254 - protein, 133 aa, Homo Sapiens
GIFRRILHVLYTDCIRQCSGPLYVDRMVLLVMGNVINWSLAAYGLIMRPNDFASYLLAIGICNLLLYFAFYIIMKKTPAESREHNRDCILLDFFDDHDIWHFLSSIAMFGSFLVLLTLDDDLDTVQRDKIYVF

SEQ ID NO: 12255 - protein, 170 aa, Homo Sapiens
MDDFVLRTGEQFSFNTTAAQPQYFKYEFPEGVDSVIVKVTSNKAFPCSVISIQDVLCPVYDLDNNVAFIGMYQTMTKKAAITVQRKDFPSNSFYVVVVVKTEDQACGGSLPFYPFAEDEPVDQGHRQKTLSVLVSQAVTSEAYVSGMLFCLGIFLSFYLLTVLLACWENW

SEQ ID NO: 12256 - protein, 110 aa, Homo Sapiens
MFALGLPFLVLLVASVESHLGVLGPKNVSQKDAEFERTYVDEVNSELVNIYTFNHTVTRNRTEGVRVSVNVLNKQKGAPLLFVVRQKEAVVSFQVPLILRGMFQRKYLYQ

SEQ ID NO: 12257 - protein, 855 aa, Homo Sapiens
MFALGLPFLVLLVASVESHLGVLGPKNVSQKDAEFERTYVDEVNSELVNIYTFNHTVTRNRTEGVRVSVNVLNKQKGAPLLFVVRQKEAVVSFQVPLILRGMFQRKYLYQKVERTLCQPPTKNESEIQFFYVDVSTLSPVNTTYQLRVSRMDDFVLRTGEQFSFNTTAAQPQYFKYEFPEGVDSVIVKVTSNKAFPCSVISIQDVLCPVYDLDNNVAFIGMYQTMTKKAAITVQRKDFPSNSFYVVVVVKTEDQACGGSLPFYPFAEDEPVDQGHRQKTLSVLVSQAVTSEAYVSGMLFCLGIFLSFYLLTVLLACWENWRQKKKTLLVAIDRACPESGHPRVLADSFPGSSPYEGYNYGSFENVSGSTDGLVDSAGTGDLSYGYQGHDQFKRRLPSGQMRQLCIAMGRSFEPVGTRPRVDSMSSVEEDDYDTLTDIDSDKNVIRTKQYLYVADLARKDKRVLRKKYQIYFWNIATIAVFYALPVVQLVITYQTVVNVTGNQDICYYNFLCAHPLGNLSAFNNILSNLGYILLGLLFLLIILQREINHNRALLRNDLCALECGIPKHFGLFYAMGTALMMEGLLSACYHVCPNYTNFQFDTSFMYMIAGLCMLKLYQKRHPDINASAYSAYACLAIVIFFSVLGVVFGKGNTAFWIVFSIIHIIATLLLSTQLYYMGRWKLDSGIFRRILHVLYTDCIRQCSGPLYVDRMVLLVMGNVINWSLAAYGLIMRPNDFASYLLAIGICNLLLYFAFYIIMKLRSGERIKLIPLLCIVCTSVVWGFALFFFFQGLSTWQKTPAESREHNRDCILLDFFDDHDIWHFLSSIAMFGSFLVSGPPGRAGWVREGSSCLLLCG

SEQ ID NO: 12258 - protein, 832 aa, Homo Sapiens
MFALGLPFLVLLVASVESHLGVLGPKNVSQKDAEFERTYVDEVNSELVNIYTFNHTVTRNRTEGVRVSVNVLNKQKGAPLLFVVRQKEAVVSFQVPLILRGMFQRKYLYQKVERTLCQPPTKNESEIQFFYVDVSTLSPVNTTYQLRVSRMDDFVLRTGEQFSFNTTAAQPQYFKYEFPEGVDSVIVKVTSNKAFPCSVISIQDVLCPVYDLDNNVAFIGMYQTMTKKAAITVQRKDFPSNSFYVVVVVKTEDQACGGSLPFYPFAEDEPVDQGHRQKTLSVLVSQAVTSEAYVSGMLFCLGIFLSFYLLTVLLACWENWRQKKKTLLVAIDRACPESGHPRVLADSFPGSSPYEGYNYGSFENVSGSTDGLVDSAGTGDLSYGYQGRSFEPVGTRPRVDSMSSVEEDDYDTLTDIDSDKNVIRTKQYLYVADLARKDKRVLRKKYQIYFWNIATIAVFYALPVVQLVITYQTVVNVTGNQDICYYNFLCAHPLGNLSAFNNILSNLGYILLGLLFLLIILQREINHNRALLRNDLCALECGIPKHFGLFYAMGTALMMEGLLSACYHVCPNYTNFQFDTSFMYMIAGLCMLKLYQKRHPDINASAYSAYACLAIVIFFSVLGVVFGKGNTAFWIVFSIIHIIATLLLSTQLYYMGRWKLDSGIFRRILHVLYTDCIRQCSGPLYVDRMVLLVMGNVINWSLAAYGLIMRPNDFASYLLAIGICNLLLYFAFYIIMKLRSGERIKLIPLLCIVCTSVVWGFALFFFFQGLSTWQKTPAESREHNRDCILLDFFDDHDIWHFLSSIAMFGSFLVLLTLDDDLDTVQRDKIYVF

SEQ ID NO: 12259 - protein, 829 aa, Homo Sapiens
MFALGLPFLVLLVASVESHLGVLGPKNVSQKDAEFERTYVDEVNSELVNIYTFNHTVTRNRTEGVRVSVNVLNKQKGAPLLFVVRQKEAVVSFQVPLILRGMFQRKYLYQKVERTLCQPPTKNESEIQFFYVDVSTLSPVNTTYQLRVSRMDDFVLRTGEQFSFNTTAAQPQYFKYEFPEGVDSVIVKVTSNKAFPCSVISIQDVLCPVYDLDNNVAFIGMYQTMTKKAAITVQRKDFPSNSFYVVVVVKTEDQACGGSLPFYPFAEDEPVDQGHRQKTLSVLVSQAVTSEAYVSGMLFCLGIFLSFYLLTVLLACWENWRQKKKTLLVAIDRACPESASLLGHPRVLADSFPGSSPYEGYNYGSFENVSGSTDGLVDSAGTGDLSYGYQGTRPRVDSMSSVEEDDYDTLTDIDSDKNVIRTKQYLYVADLARKDKRVLRKKYQIYFWNIATIAVFYALPVVQLVITYQTVVNVTGNQDICYYNFLCAHPLGNLSAFNNILSNLGYILLGLLFLLIILQREINHNRALLRNDLCALECGIPKHFGLFYAMGTALMMEGLLSACYHVCPNYTNFQFDTSFMYMIAGLCMLKLYQKRHPDINASAYSAYACLAIVIFFSVLGVVFGKGNTAFWIVFSIIHIIATLLLSTQLYYMGRWKLDSGIFRRILHVLYTDCIRQCSGPLYVDRMVLLVMGNVINWSLAAYGLIMRPNDFASYLLAIGICNLLLYFAFYIIMKLRSGERIKLIPLLCIVCTSVVWGFALFFFFQGLSTWQKTPAESREHNRDCILLDFFDDHDIWHFLSSIAMFGSFLVLLTLDDDLDTVQRDKIYVF

SEQ ID NO: 12260 - protein, 832 aa, Homo Sapiens; identical to SEQ ID NO: 12258

SEQ ID NO: 12261 - protein, 855 aa, Homo Sapiens; identical to SEQ ID NO: 12257

SEQ ID NO: 12262 - protein, 98 aa, Homo Sapiens
MFQRKYLYQKVERTLCQPPTKNESEIQFFYVDVSTLSPVNTTYQLRVSRMDDFVLRTGEQFSFNTTAAQPQYFKYEFPEGVDSVIVKVTSNKAFPCSV

SEQ ID NO: 12263 - protein, 124 aa, Homo Sapiens
MRPNDFASYLLAIGICNLLLYFAFYIIMKLRSGERIKLIPLLCIVCTSVVWGFALFFFFQGLSTWQKTPAESREHNRDCILLDFFDDHDIWHFLSSIAMFGSFLVLLTLDDDLDTVQRDKIYVF

SEQ ID NO: 12264 - protein, 602 aa, Homo Sapiens
MLLPLLLSSLLGGSQAMDGRFWIRVQESVMVPEGLCISVPCSFSYPRQDWTGSTPAYGYWFKAVTETTKGAPVATNHQSREVEMSTRGRFQLTGDPAKGNCSLVIRDAQMQDESQYFFRVERGSYVRYNFMNDGFFLKVTALTQKPDVYIPETLEPGQPVTVICVFNWAFEECPPPSFSWTGAALSSQGTKPTTSHFSVLSFTPRPQDHNTDLTCHVDFSRKGVSAQRTVRLRVAYAPRDLVISISRDNTPALEPQPQGNVPYLEAQKGQFLRLLCAADSQPPATLSWVLQNRVLSSSHPWGPRPLGLELPGVKAGDSGRYTCRAENRLGSQQRALDLSVQYPPENLRVMVSQANRTVLENLGNGTSLPVLEGQSLCLVCVTHSSPPARLSWTQRGQVLSPSQPSDPGVLELPRVQVEHEGEFTCHARHPLGSQHVSLSLSVHYKKGLISTAFSNGAFLGIGITALLFLCLALIIMKILPKRRTQTETPRPRFSRHSTILDYINVVPTAGPLAQKRNQKATPNSPRTPLPPGAPSPESKKNQKKQYQLPSFPEPKSSTQAPESQESQEELHYATLNFPGVRPRPEARMPKGTQADYAEVKFQ

SEQ ID NO: 12265 - protein, 697 aa, Homo Sapiens
MLLPLLLSSLLGGSQAMDGRFWIRVQESVMVPEGLCISVPCSFSYPRQDWTGSTPAYGYWFKAVTETTKGAPVATNHQSREVEMSTRGRFQLTGDPAKGNCSLVIRDAQMQDESQYFFRVERGSYVRYNFMNDGFFLKVTALTQKPDVYIPETLEPGQPVTVICVFNWAFEECPPPSFSWTGAALSSQGTKPTTSHFSVLSFTPRPQDHNTDLTCHVDFSRKGVSAQRTVRLRVAYAPRDLVISISRDNTPALEPQPQGNVPYLEAQKGQFLRLLCAADSQPPATLSWVLQNRVLSSSHPWGPRPLGLELPGVKAGDSGRYTCRAENRLGSQQRALDLSVQYPPENLRVMVSQANRTVLENLGNGTSLPVLEGQSLCLVCVTHSSPPARLSWTQRGQVLSPSQPSDPGVLELPRVQVEHEGEFTCHARHPLGSQHVSLSLSVHYSPKLLGPSCSWEAEGLHCSCSSQASPAPSLRWWLGEELLEGNSSQDSFEVTPSSAGPWANSSLSLHGGLSSGLRLRCEAWNVHGAQSGSILQLPDKKGLISTAFSNGAFLGIGITALLFLCLALIIMKILPKRRTQTETPRPRFSRHSTILDYINVVPTAGPLAQKRNQKATPNSPRTPLPPGAPSPESKKNQKKQYQLPSFPEPKSSTQAPESQESQEELHYATLNFPGVRPRPEARMPKGTQADYAEVKFQ

SEQ ID NO: 12266 - protein, 512 aa, Homo Sapiens
MLLPLLLSSLLGGSQAMDGRFWIRVQESVMVPEGLCISVPCSFSYPRQDWTGSTPAYGYWFKAVTETTKGAPVATNHQSREVEMSTRGRFQLTGDPAKGNCSLVIRDAQMQDESQYFFRVERGSYVRYNFMNDGFFLKVTALTQKPDVYIPETLEPGQPVTVICVFNWAFEECPPPSFSWTGAALSSQGTKPTTSHFSVLSFTPRPQDHNTDLTCHVDFSRKGVSAQRTVRLRVAYAPRDLVISISRDNTPDPPENLRVMVSQANRTVLENLGNGTSLPVLEGQSLCLVCVTHSSPPARLSWTQRGQVLSPSQPSDPGVLELPRVQVEHEGEFTCHARHPLGSQHVSLSLSVHYKKGLISTAFSNGAFLGIGITALLFLCLALIIMKILPKRRTQTETPRPRFSRHSTILDYINVVPTAGPLAQKRNQKATPNSPRTPLPPGAPSPESKKNQKKQYQLPSFPEPKSSTQAPESQESQEELHYATLNFPGVRPRPEARMPKGTQADYAEVKFQ

SEQ ID NO: 12267 - protein, 554 aa, Homo Sapiens
MLLPLLLSSLLGGSQAMDGRFWIRVQESVMVPEGLCISVPCSFSYPRQDWTGSTPAYGYWFKAVTETTKGAPVATNHQSREVEMSTRGRFQLTGDPAKGNCSLVIRDAQMQDESQYFFRVERGSYVRYNFMNDGFFLKVTGTKPTTSHFSVLSFTPRPQDHNTDLTCHVDFSRKGVSAQRTVRLRVAYAPRDLVISISRDNTPALEPQPQGNVPYLEAQKGQFLRLLCAADSQPPATLSWVLQNRVLSSSHPWGPRPLGLELPGVKAGDSGRYTCRAENRLGSQQRALDLSVQYPPENLRVMVSQANRTVLENLGNGTSLPVLEGQSLCLVCVTHSSPPARLSWTQRGQVLSPSQPSDPGVLELPRVQVEHEGEFTCHARHPLGSQHVSLSLSVHYKKGLISTAFSNGAFLGIGITALLFLCLALIIMKILPKRRTQTETPRPRFSRHSTILDYINVVPTAGPLAQKRNQKATPNSPRTPLPPGAPSPESKKNQKKQYQLPSFPEPKSSTQAPESQESQEELHYATLNFPGVRPRPEARMPKGTQADYAEVKFQ

SEQ ID NO: 12268 - protein, 639 aa, Homo Sapiens
MLLPLLLSSLLGGSQAMDGRFWIRVQESVMVPEGLCISVPCSFSYPRQDWTGSTPAYGYWFKAVTETTKGAPVATNHQSREVEMSTRGRFQLTGDPAKGNCSLVIRDAQMQDESQYFFRVERGSYVRYNFMNDGFFLKVTVLSFTPRPQDHNTDLTCHVDFSRKGVSAQRTVRLRVAYAPRDLVISISRDNTPALEPQPQGNVPYLEAQKGQFLRLLCAADSQPPATLSWVLQNRVLSSSHPWGPRPLGLELPGVKAGDSGRYTCRAENRLGSQQRALDLSVQYPPENLRVMVSQANRTVLENLGNGTSLPVLEGQSLCLVCVTHSSPPARLSWTQRGQVLSPSQPSDPGVLELPRVQVEHEGEFTCHARHPLGSQHVSLSLSVHYSPKLLGPSCSWEAEGLHCSCSSQASPAPSLRWWLGEELLEGNSSQDSFEVTPSSAGPWANSSLSLHGGLSSGLRLRCEAWNVHGAQSGSILQLPDKKGLISTAFSNGAFLGIGITALLFLCLALIIMKILPKRRTQTETPRPRFSRHSTILDYINVVPTAGPLAQKRNQKATPNSPRTPLPPGAPSPESKKNQKKQYQLPSFPEPKSSTQAPESQESQEELHYATLNFPGVRPRPEARMPKGTQADYAEVKFQ

SEQ ID NO: 12269 - protein, 544 aa, Homo Sapiens
MLLPLLLSSLLGGSQAMDGRFWIRVQESVMVPEGLCISVPCSFSYPRQDWTGSTPAYGYWFKAVTETTKGAPVATNHQSREVEMSTRGRFQLTGDPAKGNCSLVIRDAQMQDESQYFFRVERGSYVRYNFMNDGFFLKVTVLSFTPRPQDHNTDLTCHVDFSRKGVSAQRTVRLRVAYAPRDLVISISRDNTPALEPQPQGNVPYLEAQKGQFLRLLCAADSQPPATLSWVLQNRVLSSSHPWGPRPLGLELPGVKAGDSGRYTCRAENRLGSQQRALDLSVQYPPENLRVMVSQANRTVLENLGNGTSLPVLEGQSLCLVCVTHSSPPARLSWTQRGQVLSPSQPSDPGVLELPRVQVEHEGEFTCHARHPLGSQHVSLSLSVHYKKGLISTAFSNGAFLGIGITALLFLCLALIIMKILPKRRTQTETPRPRFSRHSTILDYINVVPTAGPLAQKRNQKATPNSPRTPLPPGAPSPESKKNQKKQYQLPSFPEPKSSTQAPESQESQEELHYATLNFPGVRPRPEARMPKGTQADYAEVKFQ

SEQ ID NO: 12270 - protein, 454 aa, Homo Sapiens
MLLPLLLSSLLGGSQAMDGRFWIRVQESVMVPEGLCISVPCSFSYPRQDWTGSTPAYGYWFKAVTETTKGAPVATNHQSREVEMSTRGRFQLTGDPAKGNCSLVIRDAQMQDESQYFFRVERGSYVRYNFMNDGFFLKVTVLSFTPRPQDHNTDLTCHVDFSRKGVSAQRTVRLRVAYAPRDLVISISRDNTPDPPENLRVMVSQANRTVLENLGNGTSLPVLEGQSLCLVCVTHSSPPARLSWTQRGQVLSPSQPSDPGVLELPRVQVEHEGEFTCHARHPLGSQHVSLSLSVHYKKGLISTAFSNGAFLGIGITALLFLCLALIIMKILPKRRTQTETPRPRFSRHSTILDYINVVPTAGPLAQKRNQKATPNSPRTPLPPGAPSPESKKNQKKQYQLPSFPEPKSSTQAPESQESQEELHYATLNFPGVRPRPEARMPKGTQADYAEVKFQ

SEQ ID NO: 12271 - protein, 155 aa, Homo Sapiens
MLLPLLLSSLLGVLSFTPRPQDHNTDLTCHVDFSRKGVSAQRTVRLRVAYAPRDLVISISRDNTPALEPQPQGNVPYLEAQKGQFLRLLCAADSQPPATLSWVLQNRVLSSSHPWGPRPLGLELPGVKAGDSGRYTCRAENRLGSQQRALDLSVQ

SEQ ID NO: 12272 - protein, 186 aa, Homo Sapiens
MRRCYCHCCCPRCWADWTGSTPAYGYWFKAVTETTKGAPVATNHQSREVEMSTRGRFQLTGDPAKGNCSLVIRDAQMQDESQYFFRVERGSYVRYNFMNDGFFLKVTALTQKPDVYIPETLEPGQPVTVICVFNWAFEECPPPSFSWTGAALSSQGTKPTTSHFSVLSFTPRPQDHNTDLTCHVDF

SEQ ID NO: 12273 - protein, 401 aa, Homo Sapiens
MQGAQEASASEMLPLLLPLLWAASYYGYGYWFLEGADVPVATNDPDEEVQEETRGRFHLLWDPRRKNCSLSIRDARRRDNAAYFFRLKSKWMKYGYTSSKLSVRVMALTHRPNISIPGTLESGHPSNLTCSVPWVCEQGTPPIFSWMSAAPTSLGPRTTQSSVLTITPRPQDHSTNLTCQVTFPGAGVTMERTIQLNVSSFKILQNTSSLPVLEGQALRLLCDADGNPPAHLSWFQGFPALNATPISNTGVLELPQVGSAEEGDFTCRAQHPLGSLQISLSLFVHWKPEGRAGGVLGAVWGASITTLVFLCVCFIFRVKTRRKKAAQPVQNTDDVNPVMVSGSRGHQHQFQTGIVSDHPAEAGPISEDEQELHYAVLHFHKVQPQEPKVTDTEYSEIKIHK

SEQ ID NO: 12274 - protein, 437 aa, Homo Sapiens
MQGAQEASASEMLPLLLPLLWAGALAQERRFQLEGPESLTVQEGLCVLVPCRLPTTLPASYYGYGYWFLEGADVPVATNDPDEEVQEETRGRFHLLWDPRRKNCSLSIRDARRRDNAAYFFRLKSKWMKYGYTSSKLSVRVMALTHRPNISIPGTLESGHPSNLTCSVPWVCEQGTPPIFSWMSAAPTSLGPRTTQSSVLTITPRPQDHSTNLTCQVTFPGAGVTMERTIQLNVSSFKILQNTSSLPVLEGQALRLLCDADGNPPAHLSWFQGFPALNATPISNTGVLELPQVGSAEEGDFTCRAQHPLGSLQISLSLFVHWKPEGRAGGVLGAVWGASITTLVFLCVCFIFRVKTRRKKAAQPVQNTDDVNPVMVSGSRGHQHQFQTGIVSDHPAEAGPISEDEQELHYAVLHFHKVQPQEPKVTDTEYSEIKIHK

SEQ ID NO: 12275 - protein, 389 aa, Homo Sapiens
MQGAQEASASEMLPLLLPLLWAGALAQERRFQLEGPESLTVQEGLCVLVPCRLPTTLPASYYGYGYWFLEGADVPVATNDPDEEVQEETRGRFHLLWDPRRKNCSLSIRDARRRDNAAYFFRLKSKWMKYGYTSSKLSVRVMALTHRPNISIPGTLESGHPSNLTCSVPWVCEQGTPPIFSWMSAAPTSLGPRTTQSSVLTITPRPQDHSTNLTCQVTFPGAGVTMERTIQLNVSWMLRRPPLSTPDAPQKVAISIFQGNSAAFKILQNTSSLPVLEGQALRLLCDADGNPPAHLSWFQGFPALNATPISNTGVLELPQVGSAEEGDFTCRAQHPLGSLQISLSLFVHWKPEGRAGGVLGAVWGASITTLVFLCVCFIFRVISTSSRQA

SEQ ID NO: 12276 - protein, 353 aa, Homo Sapiens
MQGAQEASASEMLPLLLPLLWAGALAQERRFQLEGPESLTVQEGLCVLVPCRLPTTLPASYYGYGYWFLEGADVPVATNDPDEEVQEETRGRFHLLWDPRRKNCSLSIRDARRRDNAAYFFRLKSKWMKYGYTSSKLSVRVMALTHRPNISIPGTLESGHPSNLTCSVPWVCEQGTPPIFSWMSAAPTSLGPRTTQSSVLTITPRPQDHSTNLTCQVTFPGAGVTMERTIQLNVSYAPQKVAISIFQGNSAAFKILQNTSSLPVLEGQALRLLCDADGNPPAHLSWFQGFPALNATPISNTGVLELPQVGSAEEGDFTCRAQHPLGSLQISLSLFVHWSSAPVPDRHSFRPPC

SEQ ID NO: 12277 - protein, 453 aa, Homo Sapiens
MQGAQEASASEMLPLLLPLLWAGALAQERRFQLEGPESLTVQEGLCVLVPCRLPTTLPASYYGYGYWFLEGADVPVATNDPDEEVQEETRGRFHLLWDPRRKNCSLSIRDARRRDNAAYFFRLKSKWMKYGYTSSKLSVRVMALTHRPNISIPGTLESGHPSNLTCSVPWVCEQGTPPIFSWMSAAPTSLGPRTTQSSVLTITPRPQDHSTNLTCQVTFPGAGVTMERTIQLNVSYAPQKVAISIFQGNSAAFKILQNTSSLPVLEGQALRLLCDADGNPPAHLSWFQGFPALNATPISNTGVLELPQVGSAEEGDFTCRAQHPLGSLQISLSLFVHWKPEGRAGGVLGAVWGASITTLVFLCVCFIFRVKTRRKKAAQPVQNTDDVNPVMVSGSRGHQHQFQTGIVSDHPAEAGPISEDEQELHYAVLHFHKVQPQEPKVTDTEYSEIKIHK

SEQ ID NO: 12278 - protein, 342 aa, Homo Sapiens
MQGAQEASASEMLPLLLPLLWAGALAQERRFQLEGPESLTVQEGLCVLVPCRLPTTLPASYYGYGYWFLEGADVPVATNDPDEEVQEETRGRFHLLWDPRRKNCSLSIRDARRRDNAAYFFRLKSKWMKYGYTSSKLSVRVMGTLESGHPSNLTCSVPWVCEQGTPPIFSWMSAAPTSLGPRTTQSSVLTITPRPQDHSTNLTCQVTFPGAGVTMERTIQLNVSYAPQKVAISIFQGNSAAFKILQNTSSLPVLEGQALRLLCDADGNPPAHLSWFQGFPALNATPISNTGVLELPQVGSAEEGDFTCRAQHPLGSLQISLSLFVHWSSAPVPDRHSFRPPC

SEQ ID NO: 12279 - protein, 467 aa, Homo Sapiens
MLLLLLLPLLWGRERVEGQKSNRKDYSLTMQSSVTVQEGMCVHVRCSFSYPVDSQTDSDPVHGYWFRAGNDISWKAPVATNNPAWAVQEETRDRFHLLGDPQTKNCTLSIRDARMSDAGRYFFRMEKGNIKWNYKYDQLSVNVTALTHRPNILIPGTLESGCFQNLTCSVPWACEQGTPPMISWMGTSVSPLHPSTTRSSVLTLIPQPQHHGTSLTCQVTLPGAGVTTNRTIQLNVSYPPQNLTVTVFQGEGTASTALGNSSSLSVLEGQSLRLVCAVDSNPPARLSWTWRSLTLYPSQPSNPLVLELQVHLGDEGEFTCRAQNSLGSQHVSLNLSLQQEYTGKMRPVSGVLLGAVGGAGATALVFLSFCVIFIVVRSCRKKSARPAADVGDIGMKDANTIRGSASQGNLTESWADDNPRHHGLAAHSSGEEREIQYAPLSFHKGEPQDLSGQEATNNEYSEIKIPK

SEQ ID NO: 12280 - protein, 185 aa, Homo Sapiens
MLLLLLLPLLWGRERVEGQKSNRKDYSLTMQSSVTVQEGMCVHVRCSFSYPVDSQTDSDPVHGYWFRAGNDISWKAPVATNNPAWAVQEETRDRFHLLGDPQTKNCTLSIRDARMSDAGRYFFRMEKGNIKWNYKYDQLSVNVTAPAPRHQPHLSGDLAWGRRDHEQDHPTQCVLSPCLSVPDPP

SEQ ID NO: 12281 - protein, 374 aa, Homo Sapiens
MLLLLLLPLLWGRERVEGQKSNRKDYSLTMQSSVTVQEGMCVHVRCSFSYPVDSQTDSDPVHGYWFRAGNDISWKAPVATNNPAWAVQEETRDRFHLLGDPQTKNCTLSIRDARMSDAGRYFFRMEKGNIKWNYKYDQLSVNVTDPPQNLTVTVFQGEGTASTALGNSSSLSVLEGQSLRLVCAVDSNPPARLSWTWRSLTLYPSQPSNPLVLELQVHLGDEGEFTCRAQNSLGSQHVSLNLSLQQEYTGKMRPVSGVLLGAVGGAGATALVFLSFCVIFIVVRSCRKKSARPAADVGDIGMKDANTIRGSASQGNLTESWADDNPRHHGLAAHSSGEEREIQYAPLSFHKGEPQDLSGQEATNNEYSEIKIPK

SEQ ID NO: 12282 - protein, 145 aa, Homo Sapiens
MLLLLLLPLLWGRERVEGQKSNRKDYSLTMQSSVTVQEGMCVHVRCSFSYPVDSQTDSDPVHGYWFRAGNDISWKAPVATNNPAWAVQEETRDRFHLLGDPQTKNCTLSIRDARMSDAGRYFFRMEKGNIKWNYKYDQLSVNVTE

SEQ ID NO: 12283 - protein, 145 aa, Homo Sapiens
MLLLLLLPLLWGRERVEGQKSNRKDYSLTMQSSVTVQEGMCVHVRCSFSYPVDSQTDSDPVHGYWFRAGNDISWKAPVATNNPAWAVQEETRDRFHLLGDPQTKNCTLSIRDARMSDAGRYFFRMEKGNIKWNYKYDQLSVNVTG

SEQ ID NO: 12284 - protein, 13 aa, Homo Sapiens
MLPLLQLGGKDNS

SEQ ID NO: 12285 - protein, 103 aa, Homo Sapiens
MLPLLQLGKSSLAAQAFVKGLIQGAIYAGIVIALLFLCLLPLIVKHIRKKQAKKAAAIRAKKSSKVRASQELEMSLKPEEPGKPVVATFSESRILEKQDKRAS

SEQ ID NO: 12286 - protein, 84 aa, Homo Sapiens
MLPLLQLVPAKLLNSSCSLEKTLQCSCSFHGIPTPSVQWWMGGVPVGVDGMDGSLQVTSTMLGPWANSTISLTEEPEMGMRLLC

SEQ ID NO: 12287 - protein, 140 aa, Homo Sapiens
MLPLLQLVPAKLLNSSCSLEKTLQCSCSFHGIPTPSVQWWMGGVPVGVDGMDGSLQVTSTMLGPWANSTISLTEEPEMGMRLLCEGKNQNGTHALSILLMSRKSSLAAQAFVKGLIQGAIYAGIVIALLFLCLLPLIVKH

SEQ ID NO: 12288 - protein, 197 aa, Homo Sapiens
MLPLLQLVPAKLLNSSCSLEKTLQCSCSFHGIPTPSVQWWMGGVPVGVDGMDGSLQVTSTMLGPWANSTISLTEEPEMGMRLLCEGKNQNGTHALSILLMSRKSSLAAQAFVKGLIQGAIYAGIVIALLFLCLLPLIVKHIRKKQAKKAAAIRAKKSSKVRASQELEMSLKPEEPGKPVVATFSESRILEKQDKRAS

SEQ ID NO: 12289 - protein, 197 aa, Homo Sapiens; identical to SEQ ID NO: 12288

SEQ ID NO: 12290 - protein, 134 aa, Homo Sapiens
MGAMCLLHASLSEYVLLFGTALGSRGHSGRYWAEISDTIISGTFHQWREGTTKSEVFYPGETVVHGPGEATAVEWGPNTWMVEYGRGVIPSTLAFALADTVFSTQDFLTLFYTLRSYARGLRLELTTYLFGQDP

SEQ ID NO: 12291 - protein, 106 aa, Homo Sapiens
MQWAVGRRWAWAALLLAVAAVLTQVVWLWLGTQSFVFQREEIAQLARQYAGLDHELAFSRLIVELRRLHPGHVLPDEELQWVFVNAGGWMGAMCLLHASLSEALLG

SEQ ID NO: 12292 - protein, 192 aa, Homo Sapiens
MQWAVGRRWAWAALLLAVAAVLTQVVWLWLGTQSFVFQREEIAQLARQYAGLDHELAFSRLIVELRRLHPGHVLPDEELQWVFVNAGGWMGAMCLLHASLSEYVLLFGTALGSRGHSGETVVHGPGEATAVEWGPNTWMVEYGRGVIPSTLAFALADTVFSTQDFLTLFYTLRSYARGLRLELTTYLFGQDP

SEQ ID NO: 12293 - protein, 223 aa, Homo Sapiens
MQWAVGRRWAWAALLLAVAAVLTQVVWLWLGTQSFVFQREEIAQLARQYAGLDHELAFSRLIVELRRLHPGHVLPDEELQWVFVNAGGWMGAMCLLHASLSEYVLLFGTALGSRGHSGRYWAEISDTIISGTFHQWREGTTKSEVFYPGETVVHGPGEATAVEWGPNTWMVEYGRGVIPSTLAFALADTVFSTQDFLTLFYTLRSYARGLRLELTTYLFGQDP

SEQ ID NO: 12294 - protein, 83 aa, Homo Sapiens
LKSALAKFKEGAEMESSKEDKMDNAQDLLSFGGLQVVINGLNSTEPLVKEYAAFVLGAAFSSNPKVQVEAIEGGALQKLLVIL

SEQ ID NO: 12295 - protein, 95 aa, Homo Sapiens
MAPQSLPSSRMAPLGMLLGLLMAACFTFCLSHQNLKEFALTNPEKSSTKETERKETKAEEELDAEVLEVFHPTHEWQALQPGQAVPAGSHVRLNL

SEQ ID NO: 12296 - protein, 123 aa, Homo Sapiens
MAPQSLPSSRMAPLGMLLGLLMAACFTFCLSHQNLKEFALTNPEKSSTKETERKETKAEEELDAEVLEVFHPTHEWQALQPGQAVPAGSHVRLNLQTGEREAKLQYEDKFRNNLKGKRLDINT

SEQ ID NO: 12297 - protein, 163 aa, Homo Sapiens
MAPQSLPSSRMAPLGMLLGLLMAACFTFCLSHQNLKEFALTNPEKSSTKETERKETKAEEELDAEVLEVFHPTHEWQALQPGQAVPAGSHVRLNLQTGEREAKLQYEDKFRNNLKGKRLDINTNTYTSQDLKSALAKFKEGAEMESSKEDKARQAEVKRLFRP

SEQ ID NO: 12298 - protein, 461 aa, Homo Sapiens
MAPQSLPSSRMAPLGMLLGLLMAACFTFCLSHQNLKEFALTNPEKSSTKETERKETKAEEELDAEVLEVFHPTHEWQALQPGQAVPAGSHVRLNLQTGEREAKLQYEDKFRNNLKGKRLDINTNTYTSQDLKSALAKFKEGAEMESSKEDKARQAEVKRLFRPIEELKKDFDELNVVIETDMQIMVRLINKFNSSSSSLEEKIAALFDLEYYVHQMDNAQDLLSFGGLQVVINGLNSTEPLVKEYAAFVLGAAFSSNPKVQVEAIEGGALQKLLVILATEQPLTAKKKVLFALCSLLRHFPYAQRQFLKLGGLQVLRTLVQEKGTEVLAVRVVTLLYDLVTEKMFAEEEAELTQEMSPEKLQQYRQVHLLPGLWEQGWCEITAHLLALPEHDAREKVLQTLGVLLTTCRDRYRQDPQLGRTLASLQAEYQVLASLELQDGEDEGYFQELLGSVNSLLKELR

SEQ ID NO: 12299 - protein, 461 aa, Homo Sapiens; identical to SEQ ID NO: 12298

SEQ ID NO: 12300 - protein, 468 aa, Homo Sapiens
MNSGTSLTMAPQSLPSSRMAPLGMLLGLLMAACFTFCLSHQNLEFALTNPEKSSTKETERKETKAEEELDAEVLEVFHPTHEWQALQPGQAVPAGSHVRLNLQTGEREAKLQYEDKFRNNLKGKRLDINTNTYTSQDLKSALAKFKEGAEMESSKEDKARQAEVKRLFRPIEELKKDFDELNVVIETDMQIMVRLINKFNSSSSSLEEKIAALFDLEYYVHQMDNAQDLLSFGGLQVVINGLNSTEPLVKEYAAFVLGAAFSSNPKVQVEAIEGGALQKLLVILATEQPLTAKKKVLFALCSLLRHFPYAQRQFLKLGGLQVLRTLVQEKGTEVLAVRVVTLLYDLVTEKMFAEEEAELTQEMSPEKLQQYRQVHLLPGLWEQGWCEITAHLLALPEHDAREKVLQTLGVLLTTCRDRYRQDPQLGRTLASLQAEYQVLASLELQDGEDEGYFQELLGSVNSLLKELR

SEQ ID NO: 12301 - protein, 123 aa, Homo Sapiens
MQEMSDMSLTMAPQSLPSSRMAPLGMLLGLLMAACFTFCLSHQNLKEFALTNPEKSSTKETERKETKAEEELDAEVLEVFHPTHEWQALQPGQAVPAGSHVRLNLQTGEREAKLQYEDKFRNN

SEQ ID NO: 12302 - protein, 125 aa, Homo Sapiens
MQEMSDMSLTMAPQSLPSSRMAPLGMLLGLLMAACFTFCLSHQNLKEFALTNPEKSSTKETERKETKAEEELDAEVLEVFHPTHEWQALQPGQAVPAGSHVRLNLQTGEREAKLQYEDKFRNNLK

SEQ ID NO: 12303 - protein, 182 aa, Homo Sapiens
GNELSDFQTNVDPAGDSVSYSIHSTARVVLTRGDVHSQVICEIAHITLQGDPLRGTANLSEAIRVPPTLEVTQQPMRAENQANVTCQVSNFYPRGLQLTWLENGNVSRTETASTLIENKDGTYNWMSWLLVNTCAHRDDVVLTCQVEHDGQQAVSKSYALEISAHQKEHGSDITHGAVTSHF

SEQ ID NO: 12304 - protein, 77 aa, Homo Sapiens
HRDDVKLTCQVEHDGQPAVSKSHDLKVSAHPKEQGSNTAPGPALASAAPLLIAFLLGPKVLLVVGVSVIYVYWKQKA

SEQ ID NO: 12305 - protein, 77 aa, Homo Sapiens; identical to SEQ ID NO: 12304

SEQ ID NO: 12306 - protein, 77 aa, Homo Sapiens; identical to SEQ ID NO: 12304

SEQ ID NO: 12307 - protein, 236 aa, Homo Sapiens
HTVSFTCESHGFSPRDITLKWFKNGNELSDFQTNVDPAGDSVSYSIHSTAKVVLTREDVHSQVICEVAHVTLQGDPLRGTANLSETIRVPPTLEVTQQPVRAENQVNVTCQVRKFYPQRLQLTWLENGNVSRTETASTLTENKDGTYNWMSWLLVNVSAHRDDVKLTCQVEHDGQPAVSKSHDLKVSAHPKEQGSNTAPGPALASAAPLLIAFLLGPKVLLVVGVSVIYVYWKQKA

SEQ ID NO: 12308 - protein, 398 aa, Homo Sapiens
MPVPASWPHLPSPFLLMTLLLGRLTGVAGEDELQVIQPEKSVSVAAGESATLRCAMTSLIPVGPIMWFRGAGAGRELIYNQKEGHFPRVTTVSELTKRNNLDFSISISNITPADAGTYYCVKFRKGSPDDVEFKSGAGTELSVRAKPSAPVVSGPAVRATPEHTVSFTCESHGFSPRDITLKWFKNGNELSDFQTNVDPAGDSVSYSIHSTARVVLTRGDVHSQVICEIAHITLQGDPLRGTANLSEAIRVPPTLEVTQQPMRAENQANVTCQVSNFYPRGLQLTWLENGNVSRTETASTLIENKDGTYNWMSWLLVNTCAHRDDVVLTCQVEHDGQQAVSKSYALEISAHQKEHGSDITHEAALAPTAPLLVALLLGPKLLLVVGVSAIYICWKQKA

SEQ ID NO: 12309 - protein, 181 aa, Homo Sapiens
MPVPASWPHLPSPFLLMTLLLGRLTGVAGEDELQVIQPEKSVSVAAGESATLRCAMTSLIPVGPIMWFRGAGAGRELIYNQKEGHFPRVTTVSELTKRNNLDFSISISNITPADAGTYYCVKFRKGSPDDVEFKSGAGTELSVREAALAPTAPLLVALLLGPKLLLVVGVSAIYICWKQKA

SEQ ID NO: 12310 - protein, 398 aa, Homo Sapiens
MPVPASWPHLPSPFLLMTLLLGRLTGVAGEEELQVIQPDKSISVAAGESATLHCTVTSLIPVGPIQWFRGAGPGRELIYNQKEGHFPRVTTVSDLTKRNNMDFSIRISNITPADAGTYYCVKFRKGSPDHVEFKSGAGTELSVRAKPSAPVVSGPAARATPQHTVSFTCESHGFSPRDITLKWFKNGNELSDFQTNVDPAGDSVSYSIHSTAKVVLTREDVHSQVICEVAHVTLQGDPLRGTANLSETIRVPPTLEVTQQPVRAENQVNVTCQVRKFYPQRLQLTWLENGNVSRTETASTLTENKDGTYNWMSWLLVNVSAHRDDVKLTCQVEHDGQPAVSKSHDLKVSAHPKEQGSNTAPGPALASAAPLLIAFLLGPKVLLVVGVSVIYVYWKQKA

SEQ ID NO: 12311 - protein, 398 aa, Homo Sapiens; identical to SEQ ID NO: 12310

SEQ ID NO: 12312 - protein, 156 aa, Homo Sapiens
MPVPASWPHPPCPFLLLTLLLGLTGVAGEDELQVIQPEKSVSVAAGESATLRCAMTSLIPVGPIMWFRGAGAGRELIYNQKEGHFPRVTTVSELTKRNNLDFSISISNITPADAGTYYCVKFRKGSPDDVEFKSGAGTELSVREAALAPTAPLLVA

SEQ ID NO: 12313 - protein, 180 aa, Homo Sapiens
MPVPASWPHPPCPFLLLTLLLGLTGVAGEDELQVIQPEKSVSVAAGESATLRCAMTSLIPVGPIMWFRGAGAGRELIYNQKEGHFPRVTTVSELTKRNNLDFSISISNITPADAGTYYCVKFRKGSPDDVEFKSGAGTELSVREAALAPTAPLLVALLLGPKLLLVVGVSAIYICWKQKA

SEQ ID NO: 12314 - protein, 58 aa, Homo Sapiens
RKGSPDHVEFKSGAGTELSVREAALAPTAPLLVALLLGPKLLLVVGVSAIYICWKQKA

SEQ ID NO: 12315 - protein, 131 aa, Homo Sapiens
  misc_feature (1)..(1): Xaa can be any naturally occurring amino acid
XPPTLEVTQQPVRAENQVNVTCQVRKFYPQRLQLTWLENGNVSRTETASTLTENKDGTYNWMSWLLVNVSAHRDDVKLTCQVEHDGQPAVSKSHDLKVSAHPKEQGSNTAPVSLEFYRRGNQDLGSNGGYC

SEQ ID NO: 12316 - protein, 198 aa, Homo Sapiens
MPIPASPLHPPLPSLLLYLLLELAGVTHVFHVQQTEMSQTVSTGESIILSCSVPNTLPNGPVLWFKGTGPNRKLIYNFKQGNFPRVKEIGDTTKPGNTDFSTRIREISLADAGTYYCVKFIKGRAIKEYQSGRGTQVFVTAEQNPRPPKNRPAGRAGSRAHHDAHTCLSALPERNSTNYFVQPCCCLRLLGLTGLLSK

SEQ ID NO: 12317 - protein, 197 aa, Homo Sapiens
MPIPASPLHPPLPSLLLYLLLELAGVTHVFHVQQTEMSQTVSTGESIILSCSVPNTLPNGPVLWFKGTGPNRKLIYNFKQGNFPRVKEIGDTTKPGNTDFSTRIREISLADAGTYYCVKFIKGRAIKEYQSGRGTQVFVTEQNPRPPKNRPAGRAGSRAHHDAHTCLSALPERNSTNYFVQPCCCLRLLGLTGLLSK

SEQ ID NO: 12318 - protein, 80 aa, Homo Sapiens
  misc_feature (1)..(1): Xaa can be any naturally occurring amino acid
XNGPVLWFKGTGPNRKLIYNFKQEQNPRPPKNRPAGRAGSRAHHDAHTCLSALPERNSTNYFVQPCCCLRLLGLTGLLSK

SEQ ID NO: 12319 - protein, 335 aa, Homo Sapiens
MDPKGLLSLTFVLFLSLAFGASYGTGGRMMNCPKILRQLGSKVLLPLTYERINKSMNKSIHIVVTMAKSLENSVENKIVSLDPSEAGPPRYLGDRYKFYLENLTLGIRESRKEDEGWYLMTLEKNVSVQRFCLQLRLYEQVSTPEIKVLNKTQENGTCTLILGCTVEKGDHVAYSWSEKAGTHPLNPANSSHLLSLTLGPQHADNIYICTVSNPISNNSQTFSPWPGCRTDPSETKPWAVYAGLLGGVIMILIMVVILQLRRRGKTNHYQTTVEKKSLTIYAQVQKPGPLQKKLDSFPAQDPCTTIYVAATEPVPESVQETNSITVYASVTLPES

SEQ ID NO: 12320 - protein, 357 aa, Homo Sapiens
MDPKGLLSLTFVLFLSLAFGASYGTGGRMMNCPKILRQLGSKVLLPLTYERINKSMNKSIHIVVTMAKSLENSVENKIVSLDPSEAGPPRYLGDRYKFYLENLTLGIRESRKEDEGWYLMTLEKNVSVQRFCLQLRLYEQVSTPEIKVLNKTQENGTCTLILGCTVEKGDHVAYSWSEKAGTHPLNPANSSHLLSLTLGPQHADNIYICTVSNPISNNSQTFSPWPGCRTDPSETKPWAVYAGLLGGVIMILIMVVILQLRRRATLTTTNQYWSQNVLTQDQERCPGCLPMVKRTITRQQWKKKALRSMPKSRNQVLFRRNLTPSQLRTLAPPYMLLPQSLSQSLSRKQIPSQSMLV

SEQ ID NO: 12321 - protein, 144 aa, Homo Sapiens
MDPKGLLSLTFVLFLSLAFGASYGTGGRMMNCPKILRQLGSKVLLPLTYERINKSMNKSIHIVVTMAKSLENSVENKIVSLDPSEAGPPRYLGDRYKFYLENLTLGIRESRKEDEGWYLMTLEKSLHFGYLYFVLGADHDNLQT

SEQ ID NO: 12322 - protein, 149 aa, Homo Sapiens
MAGSPTCLTLIYILWQLTEHLSKPKVTMGLQSNKNGTCVTNLTCCMEHGEEDVIYTWKALGQAANESHNGSILPISWRWGESDMTFICVARNPVSRNFSSPILARKLCEENNPKGRSSKYGLLHCGNTEKDGKSPLTAHDARHTKAICL

SEQ ID NO: 12323 - protein, 188 aa, Homo Sapiens
MAGSPTCLTLIYILWQLTEHLSKPKVTMGLQSNKNGTCVTNLTCCMEHGEEDVIYTWKALGQAANESHNGSILPISWRWGESDMTFICVARNPVSRNFSSPILARKLCEEYIEEKKRVDICRETPNICPHSGENTEYDTIPHTNRTILKEDPANTVYSTVEIPKKMENPHSLLTMPDTPRLFAYENVI

SEQ ID NO: 12324 - protein, 228 aa, Homo Sapiens
MAGSPTCLTLIYILWQLTEHLSKPKVTMGLQSNKNGTCVTNLTCCMEHGEEDVIYTWKALGQAANESHNGSILPISWRWGESDMTFICVARNPVSRNFSSPILARKLCEGAADDPDSSMVLLCLLLVPLLLSLFVLGLFLWFLKRERQEEYIEEKKRVDICRETPNICPHSGENTEYDTIPHTNRTILKEDPANTVYSTVEIPKKMENPHSLLTMPDTPRLFAYENVI

SEQ ID NO: 12325 - protein, 241 aa, Homo Sapiens
MAGSPTCLTLIYILWQLTEHLSKPKVTMGLQSNKNGTCVTNLTCCMEHGEEDVIYTWKALGQAANESHNGSILPISWRWGESDMTFICVARNPVSRNFSSPILARKLCEGDCLSPLHRRLCPGAADDPDSSMVLLCLLLVPLLLSLFVLGLFLWFLKRERQEEYIEEKKRVDICRETPNICPHSGENTEYDTIPHTNRTILKEDPANTVYSTVEIPKKMENPHSLLTMPDTPRLFAYENVI

SEQ ID NO: 12326 - protein, 335 aa, Homo Sapiens
MAGSPTCLTLIYILWQLTGSAASGPVKELVGSVGGAVTFPLKSKVKQVDSIVWTFNTTPLVTIQPEGGTIIVTQNRNRERVDFPDGGYSLKLSKLKKNDSGIYYVGIYSSSLQQPSTQEYVLHVYEHLSKPKVTMGLQSNKNGTCVTNLTCCMEHGEEDVIYTWKALGQAANESHNGSILPISWRWGESDMTFICVARNPVSRNFSSPILARKLCEGAADDPDSSMVLLCLLLVPLLLSLFVLGLFLWFLKRERQEEYIEEKKRVDICRETPNICPHSGENTEYDTIPHTNRTILKEDPANTVYSTVEIPKKMENPHSLLTMPDTPRLFAYENVI

SEQ ID NO: 12327 - protein, 296 aa, Homo Sapiens
MAGSPTCLTLIYILWQLTGSAASGPVKELVGSVGGAVTFPLKSKVKQVDSIVWTFNTTPLVTIQPEGGTIIVTQNRNRERVDFPDGGYSLKLSKLKKNDSGIYYVGIYSSSLQQPSTQEYVLHVYEHLSKPKVTMGLQSNKNGTCVTNLTCCMEHGEEDVIYTWKALGQAANESHNGSILPISWRWGESDMTFICVARNPVSRNFSSPILARKLCEGAADDPDSSMVLLCLLLVPLLLSLFVLGLFLWFLKRERQEENNPKGRSSKYGLLHCGNTEKDGKSPLTAHDARHTKAICL

SEQ ID NO: 12328 - protein, 165 aa, Homo Sapiens
MAGSPTCLTLIYILWQLTGSAASGPVKELVGSVGGAVTFPLKSKVKQVDSIVWTFNTTPLVTIQPEGGTIIVTQNRNRERVDFPDGGYSLKLSKLKKNDSGIYYVGIYSSSLQQPSTQEYVLHVYENNPKGRSSKYGLLHCGNTEKDGKSPLTAHDARHTKAICL

SEQ ID NO: 12329 - protein, 204 aa, Homo Sapiens
MAGSPTCLTLIYILWQLTGSAASGPVKELVGSVGGAVTFPLKSKVKQVDSIVWTFNTTPLVTIQPEGGTIIVTQNRNRERVDFPDGGYSLKLSKLKKNDSGIYYVGIYSSSLQQPSTQEYVLHVYEYIEEKKRVDICRETPNICPHSGENTEYDTIPHTNRTILKEDPANTVYSTVEIPKKMENPHSLLTMPDTPRLFAYENVI

SEQ ID NO: 12330 - protein, 236 aa, Homo Sapiens
  misc_feature (1)..(1): Xaa can be any naturally occurring amino acid
XAGSPTCLTLIYILWQLTGSAASGPVKELVGSVGGAVTFPLKSKVKQVDSIVWTFNTTPLVTIQPEGGTIIVTQNRNRERVDFPDGGYSLKLSKLKKNDSGIYYVGIYSSSLQQPSTQEYVLHVYEHLSKPKVTMGLQSNKNGTCVTNLTCCMEHGEEDVIYTWKALGQAANESHNGSILPISWRWGESDMTFICVARNPVSRNFSSPILARKLCEENNPKGRSSKYGLLHCGNTE

SEQ ID NO: 12331 - protein, 532 aa, Homo Sapiens
MAGPRPPGDSPAIKEDSTGLGPTHEPFSGQPNSTSGDVLLSRRGPGHAIRPPGRAMVLMQDKGSSQQWPGLGGEGGGTGPLSMLRAALLLISLPWGAQGTASTSLSTAGGHTVPPTGGRYLSIGDGSVMEFEFPEDSEGIIVISSQYPGQANRTAPGPMLRVTSLDTEVLTIKNVSAITWGGGGGFVVSIHSGLAGLAPLHIQLVDAHEAPPTLIEERRDFCIKVSPAEDTPATLSADLAHFSENPILYLLLPLIFVNKCSFGCKVELEVLKGLMQSPQPMLLGLLGQFLVMPLYAFLMAKVFMLPKALALGLIITCSSPGGGGSYLFSLLLGGDVTLAISMTFLSTVAATGFLPLSSAIYSRLLSIHETLHVPISKILGTLLFIAIPIAVGVLIKSKLPKFSQLLLQVVKPFSFVLLLGGLFLAYRMGVFILAGIRLPIVLVGITVPLVGLLVGYCLATCLKLPVAQRRTVSIEVGVQNSLLALAMLQLSLRRLQADYASQAPFIVALSGTSEMLALVIGHFIYSSLFPVP

SEQ ID NO: 12332 - protein, 448 aa, Homo Sapiens
MVLMQDKGSSQQWPGLGGEGGGTGPLSMLRAALLLISLPWGAQGTASTSLSTAGGHTVPPTGGRYLSIGDGSVMEFEFPEDSEGIIVISSQYPGQANRTAPGPMLRVTSLDTEVLTIKNLVDAHEAPPTLIEERRDFCIKVSPAEDTPATLSADLAHFSENPILYLLLPLIFVNKCSFGCKVELEVLKGLMQSPQPMLLGLLGQFLVMPLYAFLMAKVFMLPKALALGLIITCSSPGGGGSYLFSLLLGGDVTLAISMTFLSTVAATGFLPLSSAIYSRLLSIHETLHVPISKILGTLLFIAIPIAVGVLIKSKLPKFSQLLLQVVKPFSFVLLLGGLFLAYRMGVFILAGIRLPIVLVGITVPLVGLLVGYCLATCLKLPVAQRRTVSIEVGVQNSLLALAMLQLSLRRLQADYASQAPFIVALSGTSEMLALVIGHFIYSSLFPVP

SEQ ID NO: 12333 - protein, 218 aa, Homo Sapiens
MVLMQDKGSSQQWPGLGGEGGGTGPLSMLRAALLLISLPWGAQGTASTSLSTAGGHTVPPTGGRYLSIGDGSVMEFEFPEDSEGIIVISSQYPGQANRTAPGPMLRVTSLDTEVLTIKNVSAITWGGGGGFVVSIHSGLAGLAPLHIQLVDAHEAPPTLIEERRDFCIKVSPAEDTPATLSADLAHFSENPILYLLLPLIFVNKCSFGCKVELEVLKG

SEQ ID NO: 12334 - protein, 477 aa, Homo Sapiens
MVLMQDKGSSQQWPGLGGEGGGTGPLSMLRAALLLISLPWGAQGTASTSLSTAGGHTVPPTGGRYLSIGDGSVMEFEFPEDSEGIIVISSQYPGQANRTAPGPMLRVTSLDTEVLTIKNVSAITWGGGGGFVVSIHSGLAGLAPLHIQLVDAHEAPPTLIEERRDFCIKVSPAEDTPATLSADLAHFSENPILYLLLPLIFVNKCSFGCKVELEVLKGLMQSPQPMLLGLLGQFLVMPLYAFLMAKVFMLPKALALGLIITCSSPGGGGSYLFSLLLGGDVTLAISMTFLSTVAATGFLPLSSAIYSRLLSIHETLHVPISKILGTLLFIAIPIAVGVLIKSKLPKFSQLLLQVVKPFSFVLLLGGLFLAYRMGVFILAGIRLPIVLVGITVPLVGLLVGYCLATCLKLPVAQRRTVSIEVGVQNSLLALAMLQLSLRRLQADYASQAPFIVALSGTSEMLALVIGHFIYSSLFPVP

SEQ ID NO: 12335 - protein, 477 aa, Homo Sapiens; identical to SEQ ID NO: 12334

SEQ ID NO: 12336 - protein, 43 aa, Homo Sapiens
GAIMGIFFCLSGVGSLLGSSLVALLSLPGGWLHCPKDFAEEEL

SEQ ID NO: 12337 - protein, 209 aa, Homo Sapiens
MDLGRDATRRFFNWFYWSINLGAVLSLLVVAFIQQNISFLLGYSIPVGCVGLAFFIFLFATPVFITKPPMGSQVSSMLKLALQNCCPQLWQRHSARDRQCARVLADERSPQPGASPQEDIANFQVLVKILPVMVTLVPYWMVYFQMQSTYVLQGLHLHIPNIFPANPANISVALRAQGSSYTIPEAWLLLANVVVVLILVPLKDRLIDP

SEQ ID NO: 12338 - protein, 581 aa, Homo Sapiens
MPAPRAREQPRVPGERQPLLPRGARGPRRWRRAAGAAVLLVEMLERAAFFGVTANLVLYLNSTNFNWTGEQATRAALVFLGASYLLAPVGGWLADVYLGRYRAVALSLLLYLAASGLLPATAFPDGRSSFCGEMPASPLGPACPSAGCPRSSPSPYCAPVLYAGLLLLGLAASSVRSNLTSFGADQVMDLGRDATRRFFNWFYWSINLGAVLSLLVVAFIQQNISFLLGYSIPVGCVGLAFFIFLFATPVFITKPPMGSQVSSMLKLALQNCCPQLWQRHSARDRQCARVLADERSPQPGASPQEDIANFQVLVKILPVMVTLVPYWMVYFQMQSTYVLQGLHLHIPNIFPANPANISVALRAQGSSYTIPEAWLLLANVVVVLILVPLKDRLIDPLLLRCKLLPSALQKMALGMFFGFTSVIVAGVLEMERLHYIHHNETVSQQIGEVLYNAAPLSIWWQIPQYLLIGISEIFASIPGLEFAYSEAPRSMQGAIMGIFFCLSGVGSLLGSSLVALLSLPGGWLHCPKDFGNINNCRMDLYFFLLAGIQAVTALLFVWIAGRYERASQGPASHSRFSRDRG

SEQ ID NO: 12339 - protein, 456 aa, Homo Sapiens
MPAPRAREQPRVPGERQPLLPRGARGPRRWRRAAGAAVLLVEMLERAAFFGVTANLVLYLNSTNFNWTGEQATRAALVFLGASYLLAPVGGWLADVYLGRYRAVALSLLLYLAASGLLPATAFPDGRSSFCGEMPASPLGPACPSAGCPRSSPSPYCAPVLYAGLLLLGLAASSVRSNLTSFGADQVMDLGRDATRRFFNWFYWSINLGAVLSLLVVAFIQQNISFLLGYSIPVGCVGLAFFIFLFATPVFITKPPMGSQVSSMLKLALQNCCPQLWQRHSARDRQCARVLADERSPQPGASPQEDIANFQVLVKILPVMVTLVPYWMVYFQMQSTYVLQGLHLHIPNIFPANPANISVALRAQGSSYTESWRWSAYTTSTTTRPCPSRLGRSCTTRHHCPSGGRSLSTCSLGSVRSLPASQAWSLPTQRPRAPCRAPSWASSSACRGWAHCWAPA

SEQ ID NO: 12340 - protein, 149 aa, Homo Sapiens
MPASPLGPACPSAGCPRSSPSPYCAPVLYAGLLLLGLAASSVRSNLTSFGADQVMDLGRDATRRFFNWFYWSINLGAVLSLLVVAFIQQNISFLLGYSIPVGCVGLAFFIFLFATPVFITKPPMGSQVSSMLKLALQNCCPQLWQRHSA

SEQ ID NO: 12341 - protein, 247 aa, Homo Sapiens
  misc_feature (1)..(1): Xaa can be any naturally occurring amino acid
XPGASPQEDIANFQVLVKILPVMVTLVPYWMVYFQIPEAWLLLANVVVVLILVPLKDRLIDPLLLRCKLLPSALQKMALGMFFGFTSVIVAGVLEMERLHYIHHNETVSQQIGEVLYNAAPLSIWWQIPQYLLIGISEIFASIPGLEFAYSEAPRSMQGAIMGIFFCLSGVGSLLGSSLVALLSLPGGWLHCPKDFGNINNCRMDLYFFLLAGIQAVTALLFVWIAGRYERASQGPASHSRFSRDRG

SEQ ID NO: 12342 - protein, 353 aa, Homo Sapiens
MGIFPGIILIFLRVKFATAAVIHQKSTTVSHEMSGLNWKPFVYGGLASIVAEFGTFPVDLTKTRLQVQGQSIDARFKEIKYRGMFHALFRICKEEGVLALYSGIAPALLRQASYGTIKIGIYQSLKRLFVERLEDETLLINMICGVVSGVISSTIANPTDVLKIRMQAQGSLFQGSMIGSFIDIYQQEGTRGLWRCLCSKAVTGCVLWLMPVIPALWEANAGGSLEGVVPTAQRAAIVVGVELPVYDITKKHLILSGMMGDTILTHFVSSFTCGLAGALASNPVDVVRTRMMNQRAIVGHVDLYKGTVDGILKMWKHEGFFALYKGFWPNWLRLGPWNIIFFITYEQLKRLQI

SEQ ID NO: 12343 - protein, 353 aa, Homo Sapiens; identical to SEQ ID NO: 12342

SEQ ID NO: 12344 - protein, 322 aa, Homo Sapiens
MGIFPGIILIFLRVKFATAAVIHQKSTTVSHEMSGLNWKPFVYGGLASIVAEFGTFPVDLTKTRLQVQGQSIDARFKEIKYRGMFHALFRICKEEGVLALYSGIAPALLRQASYGTIKIGIYQSLKRLFVERLEDETLLINMICGVVSGVISSTIANPTDVLKIRMQAQGSLFQGSMIGSFIDIYQQEGTRGLWRGVVPTAQRAAIVVGVELPVYDITKKHLILSGMMGDTILTHFVSSFTCGLAGALASNPVDVVRTRMMNQRAIVGHVDLYKGTVDGILKMWKHEGFFALYKGFWPNWLRLGPWNIIFFITYEQLKRLQI

SEQ ID NO: 12345 - protein, 198 aa, Homo Sapiens
MGIFPGIILIFLRVKFATAAVIVSGHQKSTTVSHEMSGLNWKPFVYGGLASIVAEFGTFPVDLTKTRLQVQGQSIDARFKEIKYRGMFHALFRICKEEGVLALYSGIAPALLRQASYGTIKIGIYQSLKRLFVERLEDETLLINMICGVVSGVISSTIANPTDVLKIRMQAQGSLFQGSMIGSFIDIYQQEGTRGLWR

SEQ ID NO: 12346 - protein, 325 aa, Homo Sapiens
MGIFPGIILIFLRVKFATAAVIVSGHQKSTTVSHEMSGLNWKPFVYGGLASIVAEFGTFPVDLTKTRLQVQGQSIDARFKEIKYRGMFHALFRICKEEGVLALYSGIAPALLRQASYGTIKIGIYQSLKRLFVERLEDETLLINMICGVVSGVISSTIANPTDVLKIRMQAQGSLFQGSMIGSFIDIYQQEGTRGLWRGVVPTAQRAAIVVGVELPVYDITKKHLILSGMMGDTILTHFVSSFTCGLAGALASNPVDVVRTRMMNQRAIVGHVDLYKGTVDGILKMWKHEGFFALYKGFWPNWLRLGPWNIIFFITYEQLKRLQI

SEQ ID NO: 12347 - protein, 325 aa, Homo Sapiens; identical to SEQ ID NO: 12346

SEQ ID NO: 12348 - protein, 290 aa, Homo Sapiens
MSGLNWKPFVYGGLASIVAEFGTFPVDLTKTRLQVQGQSIDARFKEIKYRGMFHALFRICKEEGVLALYSGIAPALLRQASYGTIKIGIYQSLKRLFVERLEDETLLINMICGVVSGVISSTIANPTDVLKIRMQAQGSLFQGSMIGSFIDIYQQEGTRGLWRGVVPTAQRAAIVVGVELPVYDITKKHLILSGMMGDTILTHFVSSFTCGLAGALASNPVDVVRTRMMNQRAIVGHVDLYKGTVDGILKMWKHEGFFALYKGFWPNWLRLGPWNIIFFITYEQLKRLQI

SEQ ID NO: 12349 - protein, 75 aa, Homo Sapiens
MLCLCLYVPVIGEAQTEFQYFESKGLPAELKSIFKLSVFIPSQEFSTYRQWKQCPLCTKGDLQIQGRRQKEAQAL

SEQ ID NO: 12350 - protein, 469 aa, Homo Sapiens
MLCLCLYVPVIGEAQTEFQYFESKGLPAELKSIFKLSVFIPSQEFSTYRQWKQKIVQAGDKDLDGQLDFEEFVHYLQDHEKKLRLVFKSLDKKNDGRIDAQEIMQSLRDLGVKISEQQAEKILKSMDKNGTMTIDWNEWRDYHLLHPVENIPEIILYWKHSTIFDVGENLTVPDEFTVEERQTGMWWRHLVAGGGAGAVSRTCTAPLDRLKVLMQVHASRSNNMGIVGGFTQMIREGGARSLWRGNGINVLKIAPESAIKFMAYEQIKRLVGSDQETLRIHERLVAGSLAGAIAQSSIYPMEVLKTRMALRKTGQYSGMLDCARRILAREGVAAFYKGYVPNMLGIIPYAGIDLAVYETLKNAWLQHYAVNSADPGVFVLLACGTMSSTCGQLASYPLALVRTRMQAQASIEGAPEVTMSSLFKHILRTEGAFGLYRGLAPNFMKVIPAVSISYVVYENLKITLGVQSR

SEQ ID NO: 12351 - protein, 501 aa, Homo Sapiens
MLQMLWHFLASFFPRAGCHGSREGDDREVRGTPAPAWRDQMASFLGKQDGRAEATEKRPTILLVVGPAEQFPKKIVQAGDKDLDGQLDFEEFVHYLQDHEKKLRLVFKSLDKKNDGRIDAQEIMQSLRDLGVKISEQQAEKILKRIRTGHFWGPVTYMDKNGTMTIDWNEWRDYHLLHPVENIPEIILYWKHSTIFDVGENLTVPDEFTVEERQTGMWWRHLVAGGGAGAVSRTCTAPLDRLKVLMQVHASRSNNMGIVGGFTQMIREGGARSLWRGNGINVLKIAPESAIKFMAYEQIKRLVGSDQETLRIHERLVAGSLAGAIAQSSIYPMEVLKTRMALRKTGQYSGMLDCARRILAREGVAAFYKGYVPNMLGIIPYAGIDLAVYETLKNAWLQHYAVNSADPGVFVLLACGTMSSTCGQLASYPLALVRTRMQAQASIEGAPEVTMSSLFKHILRTEGAFGLYRGLAPNFMKVIPAVSISYVVYENLKITLGVQSR

SEQ ID NO: 12352 - protein, 489 aa, Homo Sapiens
MLQMLWHFLASFFPRAGCHGSREGDDREVRGTPAPAWRDQMASFLGKQDGRAEATEKRPTILLVVGPAEQFPKKIVQAGDKDLDGQLDFEEFVHYLQDHEKKLRLVFKSLDKKNDGRIDAQEIMQSLRDLGVKISEQQAEKILKSMDKNGTMTIDWNEWRDYHLLHPVENIPEIILYWKHSTIFDVGENLTVPDEFTVEERQTGMWWRHLVAGGGAGAVSRTCTAPLDRLKVLMQVHASRSNNMGIVGGFTQMIREGGARSLWRGNGINVLKIAPESAIKFMAYEQIKRLVGSDQETLRIHERLVAGSLAGAIAQSSIYPMEVLKTRMALRKTGQYSGMLDCARRILAREGVAAFYKGYVPNMLGIIPYAGIDLAVYETLKNAWLQHYAVNSADPGVFVLLACGTMSSTCGQLASYPLALVRTRMQAQASIEGAPEVTMSSLFKHILRTEGAFGLYRGLAPNFMKVIPAVSISYVVYENLKITLGVQSR

SEQ ID NO: 12353 - protein, 515 aa, Homo Sapiens
MVSSVLCRCVASPPPDAAATAASSSASSPASVGDPCGGAICGGPDHRLRLWRLFQTLDVNRDGGLCVNDLAVGLRRLGLHRTEGELQKIVQAGDKDLDGQLDFEEFVHYLQDHEKKLRLVFKSLDKKNDGRIDAQEIMQSLRDLGVKISEQQAEKILKRIRTGHFWGPVTYMDKNGTMTIDWNEWRDYHLLHPVENIPEIILYWKHSTIFDVGENLTVPDEFTVEERQTGMWWRHLVAGGGAGAVSRTCTAPLDRLKVLMQVHASRSNNMGIVGGFTQMIREGGARSLWRGNGINVLKIAPESAIKFMAYEQIKRLVGSDQETLRIHERLVAGSLAGAIAQSSIYPMEVLKTRMALRKTGQYSGMLDCARRILAREGVAAFYKGYVPNMLGIIPYAGIDLAVYETLKNAWLQHYAVNSADPGVFVLLACGTMSSTCGQLASYPLALVRTRMQAQASIEGAPEVTMSSLFKHILRTEGAFGLYRGLAPNFMKVIPAVSISYVVYENLKITLGVQSR

SEQ ID NO: 12354 - protein, 503 aa, Homo Sapiens
MVSSVLCRCVASPPPDAAATAASSSASSPASVGDPCGGAICGGPDHRLRLWRLFQTLDVNRDGGLCVNDLAVGLRRLGLHRTEGELQKIVQAGDKDLDGQLDFEEFVHYLQDHEKKLRLVFKSLDKKNDGRIDAQEIMQSLRDLGVKISEQQAEKILKSMDKNGTMTIDWNEWRDYHLLHPVENIPEIILYWKHSTIFDVGENLTVPDEFTVEERQTGMWWRHLVAGGGAGAVSRTCTAPLDRLKVLMQVHASRSNNMGIVGGFTQMIREGGARSLWRGNGINVLKIAPESAIKFMAYEQIKRLVGSDQETLRIHERLVAGSLAGAIAQSSIYPMEVLKTRMALRKTGQYSGMLDCARRILAREGVAAFYKGYVPNMLGIIPYAGIDLAVYETLKNAWLQHYAVNSADPGVFVLLACGTMSSTCGQLASYPLALVRTRMQAQASIEGAPEVTMSSLFKHILRTEGAFGLYRGLAPNFMKVIPAVSISYVVYENLKITLGVQSR

SEQ ID NO: 12355 - protein, 165 aa, Homo Sapiens
  misc_feature (1)..(1): Xaa can be any naturally occurring amino acid
XTVEERQTGMWWRHLVAGGGAGAVSRTCTAPLDRLKVLMQVLKTRMALRKTGQYSGMLDCARRILAREGVAAFYKGYVPNMLGIIPYAGIDLAVYETLKNAWLQHYAVNSADPGVFVLLACGTMSSTCGQLASYPLALVRTRMQAQGKAGPGQSPGRSGGADRSI

SEQ ID NO: 12356 - protein, 81 aa, Homo Sapiens
MEQQDQSMKEGRLTLVLALATLIAAFGSSFQYGYNVAAVNSPALLMQQFYNETYYGRTGEFMEDFPLTLLWSVTVSMFPFG

SEQ ID NO: 12357 - protein, 139 aa, Homo Sapiens
MEQQDQSMKEGRLTLVLALATLIAAFGSSFQYGYNVAAVNSPALLMQQFYNETYYGRTGEFMEDFPLTLLWSVTVSMFPFGGFIGSLLVGPLVNKFGRKGALLFNNIFSIVPAILMGCSRVATSFELIIISRLLVGICA

SEQ ID NO: 12358 - protein, 166 aa, Homo Sapiens
MEQQDQSMKEGRLTLVLALATLIAAFGSSFQYGYNVAAVNSPALLMQQFYNETYYGRTGEFMEDFPLTLLWSVTVSMFPFGGFIGSLLVGPLVNKFGRKGALLFNNIFSIVPAILMGCSRVATSFELIIISRLLVGICAGVSSNVVPMYLGELAPKNLRGALGVVP

SEQ ID NO: 12359 - protein, 190 aa, Homo Sapiens
MEQQDQSMKEGRLTLVLALATLIAAFGSSFQYGYNVAAVNSPALLMQQFYNETYYGRTGEFMEDFPLTLLWSVTVSMFPFGGFIGSLLVGPLVNKFGRKGALLFNNIFSIVPAILMGCSRVATSFELIIISRLLVGICAGVSSNVVPMYLGELAPKNLRGALGVVPQLFITVGILVAQIFGLRNLLANVD

SEQ ID NO: 12360 - protein, 190 aa, Homo Sapiens; identical to SEQ ID NO: 12359

SEQ ID NO: 12361 - protein, 190 aa, Homo Sapiens; identical to SEQ ID NO: 12359

SEQ ID NO: 12362 - protein, 190 aa, Homo Sapiens; identical to SEQ ID NO: 12359

SEQ ID NO: 12363 - protein, 244 aa, Homo Sapiens
MEQQDQSMKEGRLTLVLALATLIAAFGSSFQYGYNVAAVNSPALLMQQFYNETYYGRTGEFMEDFPLTLLWSVTVSMFPFGGFIGSLLVGPLVNKFGRKGALLFNNIFSIVPAILMGCSRVATSFELIIISRLLVGICAGVSSNVVPMYLGELAPKNLRGALGVVPQLFITVGILVAQIFGLRNLLANVDGEFRTSREHPHPFTTTLGPLLVFQSHHHRTGLSADWSLLTGWMSLGGPSCPEPT

SEQ ID NO: 12364 - protein, 501 aa, Homo Sapiens
MEQQDQSMKEGRLTLVLALATLIAAFGSSFQYGYNVAAVNSPALLMQQFYNETYYGRTGEFMEDFPLTLLWSVTVSMFPFGGFIGSLLVGPLVNKFGRKGALLFNNIFSIVPAILMGCSRVATSFELIIISRLLVGICAGVSSNVVPMYLGELAPKNLRGALGVVPQLFITVGILVAQIFGLRNLLANVDGWPILLGLTGVPAALQLLLLPFFPESPRYLLIQKKDEAAAKKALQTLRGWDSVDREVAEIRQEDEAEKAAGFISVLKLFRMRSLRWQLLSIIVLMGGQQLSGVNAIYYYADQIYLSAGVPEEHVQYVTAGTGAVNVVMTFCAVFVVELLGRRLLLLLGFSICLIACCVLTAALALQDTVSWMPYISIVCVISYVIGHALGPSPIPALLITEIFLQSSRPSAFMVGGSVHWLSNFTVGLIFPFIQEGLGPYSFIVFAVICLLTTIYIFLIVPETKAKTFIEINQIFTKMNKVSEVYPEKEELKELPPVTSEQ

SEQ ID NO: 12365 - protein, 313 aa, Homo Sapiens
MALLVDRVRGHWRIAAGLLFNLLVSICIVFLNKWIYVYHGFPNMSLTLVHFVVTWLGLYICQKLDIFAPKSLPPSRLLLLALSFCGFVVFTNLSLQNNTIGTYQLAKAMTTPVIIAIQTFCYQKTFSTRIQLTLIPITLGVILNSYYDVKFNFLGMVFAALGVLVTSLYQVWVGAKQHELQVNSMQLLYYQAPMSSAMLLVAVPFFEPVFGEGGIFGPWSVSALLMVLLSGVIAFMVNLSIYWIIGNTSPVTYNMFGHFKFCITLFGGYVLFKDPLSINQALGILCTLFGILAYTHFKLSEQEGSRSKLAQRP

SEQ ID NO: 12366 - protein, 125 aa, Homo Sapiens
QAPMSSAMLLVAVPFFEPVFGEGGIFGPWSVSALSTRLECSGTIMAHCSLSLLGSSNPPASTSPVAGTTGAHQHTWLIFIFFVETEFCHVAQADLKLLSSSHLSASASRSAGITGLSHHTWPVIS

SEQ ID NO: 12367 - protein, 39 aa, Homo Sapiens
MKNVMVMILVVDTKILILIMKVNFDILEREKHHMLKIMQ

SEQ ID NO: 12368 - protein, 39 aa, Homo Sapiens; identical to SEQ ID NO: 12367

SEQ ID NO: 12369 - protein, 38 aa, Homo Sapiens
MKVHMHTKFCLICLLTFIFHHCNHCHEEHDHGPEALHR

SEQ ID NO: 12370 - protein, 126 aa, Homo Sapiens
MKVHMHTKFCLICLLTFIFHHCNHCHEEHDHGPEALHRQHRGMTELEPSKFSKQAAENEKKYYIEKLFERYGENGRLSFFGLEKLLTNLGLGERKVVEINHEDLGHDHVSHLDILAVQEGKHFHSH

SEQ ID NO: 12371 - protein, 130 aa, Homo Sapiens
MKVHMHTKFCLICLLTFIFHHCNHCHEEHDHGPEALHRQHRGMTELEPSKFSKQAAENEKKYYIEKLFERYGENGRLSFFGLEKLLTNLGLGERKVVEINHEDLGHDHVSHLDILAVQEGKHFHSHNHQH

SEQ ID NO: 12372 - protein, 831 aa, Homo Sapiens
MKVHMHTKFCLICLLTFIFHHCNHCHEEHDHGPEALHRQHRGMTELEPSKFSKQAAENEKKYYIEKLFERYGENGRLSFFGLEKLLTNLGLGERKVVEINHEDLGHDHVSHLDILAVQEGKHFHSHNHQHSHNHLNSENQTVTSVSTKRNHKCDPEKETVEVSVKSDDKHMHDHNHRLRHHHRLHHHLDHNNTHHFHNDSITPSERGEPSNEPSTETNKTQEQSDVKLPKGKRKKKGRKSNENSEVITPGFPPNHDQGEQYEHNRVHKPDRVHNPGHSHVHLPERNGHDPGRGHQDLDPDNEGELRHTRKREAPHVKNNAIISLRKDLNEDDHHHECLNVTQLLKYYGHGANSPISTDLFTYLCPALLYQIDSRLCIEHFDKLLVEDINKDKNLVPEDEANIGASAWICGIISITVISLLSLLGVILVPIINQGCFKFLLTFLVALAVGTMSGDALLHLLPHSQGGHDHSHQHAHGHGHSHGHESNKFLEEYDAVLKGLVALGGIYLLFIIEHCIRMFKHYKQQRGKQKWFMKQNTEESTIGRKLSDHKLNNTPDSDWLQLKPLAGTDDSVVSEDRLNETELTDLEGQQESPPKNYLCIEEEKIIDHSHSDGLHTIHEHDLHAAAHNHHGENKTVLRKHNHQWHHKHSHHSHGPCHSGSDLKETGIANIAWMVIMGDGIHNFSDGLAIGAAFSAGLTGGISTSIAVFCHELPHELGDFAVLLKAGMTVKQAIVYNLLSAMMAYIGMLIGTAVGQYANNITLWIFAVTAGMFLYVALVDMLPEMLHGDGDNEEHGFCPVGQFILQNLGLLFGFAIMLVIALYEDKIVFDIQF

SEQ ID NO: 12373 - protein, 831 aa, Homo Sapiens; identical to SEQ ID NO: 12372

SEQ ID NO: 12374 - protein, 202 aa, Homo Sapiens
MKKTFYKRLLLYFIALAIGTLYSNALFQLIPEAFGFNPLEDYYVSKSAVVFGGFYLFFFTEKILKILLKQKNEHHHGHSHYASESLPSKKDQEEGVMEKLQNGDLDHMIPQHCSSELDGKAPMVDEKVIVGSLSVQDLQASQSACYWLKGVRYSDIGTLAWMITLSDGLHNFIDGLAIGASFTVSVFQGISTSVAILCEEFP

SEQ ID NO: 12375 - protein, 53 aa, Homo Sapiens
MKLLLLHPAFQSCLLLTLLGLWRTTPEAHASSLGAPAISAASFLQDLIHRYGE

SEQ ID NO: 12376 - protein, 89 aa, Homo Sapiens
MKLLLLHPAFQSCLLLTLLGLWRTTPEAHASSLGAPAISAASFLQDLIHRYGEGDSLTLQQLKALLNHLDVGVGRGNVTQHVQGHRNLS

SEQ ID NO: 12377 - protein, 90 aa, Homo Sapiens
MKLLLLHPAFQSCLLLTLLGLWRTTPEAHASSLGAPAISAASFLQDLIHRYGEGDSLTLQQLKALLNHLDVGVGRGNVTQHVQGHRNLST

SEQ ID NO: 12378 - protein, 122 aa, Homo Sapiens
MKLLLLHPAFQSCLLLTLLGLWRTTPEAHASSLGAPAISAASFLQDLIHRYGEGDSLTLQQLKALLNHLDVGVGRGNVTQHVQGHRNLSTCFSSGDLFTAHNFSEQSRIGSSELQEFCPTIL

SEQ ID NO: 12379 - protein, 127 aa, Homo Sapiens
MKLLLLHPAFQSCLLLTLLGLWRTTPEAHASSLGAPAISAASFLQDLIHRYGEGDSLTLQQLKALLNHLDVGVGRGNVTQHVQGHRNLSTCFSSGDLFTAHNFSEQSRIGSSELQEFCPTILQQLDS

SEQ ID NO: 12380 - protein, 155 aa, Homo Sapiens
MKLLLLHPAFQSCLLLTLLGLWRTTPEAHASSLGAPAISAASFLQDLIHRYGEGDSLTLQQLKALLNHLDVGVGRGNVTQHVQGHRNLSTCFSSGDLFTAHNFSEQSRIGSSELQEFCPTILQQLDSRACTSENQENEENEQTEEGRPSAVEVWG

SEQ ID NO: 12381 - protein, 492 aa, Homo Sapiens
MKLLLLHPAFQSCLLLTLLGLWRTTPEAHASSLGAPAISAASFLQDLIHRYGEGDSLTLQQLKALLNHLDVGVGRGNVTQHVQGHRNLSTCFSSGDLFTAHNFSEQSRIGSSELQEFCPTILQQLDSRACTSENQENEENEQTEEGRPSAVEVWGFGFLSVSLINLASLLGVLVLPCTEKAFFSRVLTYFIALSIGTLLSNALFQLIPEAFGFNPLEDYYVSKSAVVFGGFYLFFFTEKILKILLKQKNEHHHGHSHYASESLPSKKDQEEGVMEKLQNGDLDHMIPQHCSSELDGKAPMVDEKVIVGSLSVQDLQASQSACYWLKGVRYSDIGTLAWMITLSDGLHNFIDGLAIGASFTVSVFQGISTSVAILCEEFPHELGDFVILLNAGMSIQQALFFNFLSACCCYLGLAFGILAGSHFSANWIFALAGGMFLYISLADMFPEMNEVCQEDERKGSILIPFIIQNLGLLTGFTIMVVLTMYSGQIQIG

SEQ ID NO: 12382 - protein, 481 aa, Homo Sapiens
MKLLLLHPAFQSCLLLTLLGLWRTTPEAHASSLGAPAISAASFLQDLIHRYGEGDSLTLQQLKALLNHLDVGVGRGNVTQHVQGHRNLSTCFSSGDLFTAHNFSEQSRIGSSELQEFCPTILQQLDSRACTSENQENEENEQTEEGRPSAVEVWGYGLLCVTVISLCSLLGASVVPFMKKTFYKRLLLYFIALAIGTLYSNALFQLIPEAFGFNPLEDYYVSKSAVVFGGFYLFFFTEKILKILLKQKNEHHHGHSHYASESLPSKKDQEEGVMEKLQNGDLDHMIPQHCSSELDGKAPMVDEKVIVGSLSVQDLQASQSACYWLKGVRYSDIGTLAWMITLSDGLHNFIDGLAIGASFTVSVFQGISTSVAILCEEFPHELGDFVILLNAGMSIQQALFFNFLSACCCYLGLAFGILAGSHFSANWIFALAGGMFLYISLADMMEFCSVAQAGVQWCHLSSLQPLPLGLKRLSCLSLPSN

SEQ ID NO: 12383 - protein, 492 aa, Homo Sapiens
MKLLLLHPAFQSCLLLTLLGLWRTTPEAHASSLGAPAISAASFLQDLIHRYGEGDSLTLQQLKALLNHLDVGVGRGNVTQHVQGHRNLSTCFSSGDLFTAHNFSEQSRIGSSELQEFCPTILQQLDSRACTSENQENEENEQTEEGRPSAVEVWGYGLLCVTVISLCSLLGASVVPFMKKTFYKRLLLYFIALAIGTLYSNALFQLIPEAFGFNPLEDYYVSKSAVVFGGFYLFFFTEKILKILLKQKNEHHHGHSHYASESLPSKKDQEEGVMEKLQNGDLDHMIPQHCSSELDGKAPMVDEKVIVGSLSVQDLQASQSACYWLKGVRYSDIGTLAWMITLSDGLHNFIDGLAIGASFTVSVFQGISTSVAILCEEFPHELGDFVILLNAGMSIQQALFFNFLSACCCYLGLAFGILAGSHFSANWIFALAGGMFLYISLADMFPEMNEVCQEDERKGSILIPFIIQNLGLLTGFTIMVVLTMYSGQIQIG

SEQ ID NO: 12384 - protein, 492 aa, Homo Sapiens; identical to SEQ ID NO: 12383

SEQ ID NO: 12385 - protein, 184 aa, Homo Sapiens
MASLVSLELGLLLAVLVVTATASPPAGLLSLLTSGQGALDQEALGGLLNTLADRVHCANGPCGKACVDIPQLLEEAVGAGAPGSAGGVLAALLDHVRSGSCFHALPSPQYFVDFVFQQHSSEVPMTLAELSALMQRLGVGREAHSDHSHRHRGASSRDPVPLISSSNSSSVWDTVCLSARDVMA

SEQ ID NO: 12386 - protein, 647 aa, Homo Sapiens
MASLVSLELGLLLAVLVVTATASPPAGLLSLLTSGQGALDQEALGGLLNTLADRVHCANGPCGKCLSVEDALGLGEPEGSGLPPGPVLEARYVARLSAAAVLYLSNPEGTCEDARAGLWASHADHLLALLESPKALTPGLSWLLQRMQARAAGQTPKMACVDIPQLLEEAVGAGAPGSAGGVLAALLDHVRSGSCFHALPSPQYFVDFVFQQHSSEVPMTLAELSALMQRLGVGREAHSDHSHRHRGASSRDPVPLISSSNSSSVWDTVCLSARDVMAAYGLSEQAGVTPEAWAQLSPALLQQQLSGACTSQSRPPVQDQLSQSERYLYGSLATLLICLCAVFGLLLLTCTGCRGVTHYILQTFLSLAVGAVTGDAVLHLTPKVLGLHTHSEEGLSPQPTWRLLAMLAGLYAFFLFENLFNLLLPRDPEDLEDGPCGHSSHSHGGHSHGVSLQLAPSELRQPKPPHEGSRADLVAEESPELLNPEPRRLSPELRLLPYMITLGDAVHNFADGLAVGAAFASSWKTGLATSLAVFCHELPHELGDFAALLHAGLSVRQALLLNLASALTAFAGLYVALAVGVSEESEAWILAVATGLFLYVALCDMLPAMLKVRDPRPWLLFLLHNVGLLGGWTVLLLLSLYEDDITF

SEQ ID NO: 12387 - protein, 622 aa, Homo Sapiens
MVDVVGLERETGPRGSPWPGLPLPSLVGPAPLLTCLCPQCLSVEDALGLGEPEGSGLPPGPVLEARYVARLSAAAVLYLSNPEGTCEDARAGLWASHADHLLALLESPKALTPGLSWLLQRMQARAAGQTPKMACVDIPQLLEEAVGAGAPGSAGGVLAALLDHVRSGSCFHALPSPQYFVDFVFQQHSSEVPMTLAELSALMQRLGVGREAHSDHSHRHRGASSRDPVPLISSSNSSSVWDTVCLSARDVMAAYGLSEQAGVTPEAWAQLSPALLQQQLSGACTSQSRPPVQDQLSQSERYLYGSLATLLICLCAVFGLLLLTCTGCRGVTHYILQTFLSLAVGAVTGDAVLHLTPKVLGLHTHSEEGLSPQPTWRLLAMLAGLYAFFLFENLFNLLLPRDPEDLEDGPCGHSSHSHGGHSHGVSLQLAPSELRQPKPPHEGSRADLVAEESPELLNPEPRRLSPELRLLPYMITLGDAVHNFADGLAVGAAFASSWKTGLATSLAVFCHELPHELGDFAALLHAGLSVRQALLLNLASALTAFAGLYVALAVGVSEESEAWILAVATGLFLYVALCDMLPAMLKVRDPRPWLLFLLHNVGLLGGWTVLLLLSLYEDDITF

SEQ ID NO: 12388 - protein, 239 aa, Homo Sapiens
MMGSPEQNHYLAQLFGLYGENGTLTAGGLARLLHSLGLGRVQGLRLGQHGPLTGRAASPAADNSTHRPQNPELSVDVWAGMPLGPSGWGDLEESKAPHLPRGPAPSGLDLLHRLLLLDHSLADHLNEDCLNGSQLLVNFGLSPAAPLTPRQFALLCPALLYQIDSRVCIGAPAPAPPGDLLSALLQSALAVLLLSLPSPLSLLLLRLLGPRLLRPLLGFLGALAVGTLCGDALLHLLPH

SEQ ID NO: 12389 - protein, 123 aa, Homo Sapiens
MMGSPVSHLLAGFCVWVVLGWVGGSVPNLGPAEQEQNHYLAQLFGLYGENGTLTAGGLARLLHSLGLGRVQGLRLGQHGPLTGRAASPAADNSTHRPQNPELSVDVWAGMPLGPSGWGDLEES

SEQ ID NO: 12390 - protein, 126 aa, Homo Sapiens
MMGSPVSHLLAGFCVWVVLGWVGGSVPNLGPAEQEQNHYLAQLFGLYGENGTLTAGGLARLLHSLGLGRVQGLRLGQHGPLTGRAASPAADNSTHRPQNPELSVDVWAGMPLGPSGWGDLEESKAP

SEQ ID NO: 12391 - protein, 129 aa, Homo Sapiens
MMGSPVSHLLAGFCVWVVLGWVGGSVPNLGPAEQEQNHYLAQLFGLYGENGTLTAGGLARLLHSLGLGRVQGLRLGQHGPLTGRAASPAADNSTHRPQNPELSVDVWAGMPLGPSGWGDLEESKAPHLP

SEQ ID NO: 12392 - protein, 156 aa, Homo Sapiens
MMGSPVSHLLAGFCVWVVLGWVGGSVPNLGPAEQEQNHYLAQLFGLYGENGTLTAGGLARLLHSLGLGRVQGLRLGQHGPLTGRAASPAADNSTHRPQNPELSVDVWAGMPLGPSGWGDLEESKAPHLPRGPAPSGLDLLHRLLLLDHSLADHLNE

SEQ ID NO: 12393 - protein, 540 aa, Homo Sapiens
MMGSPVSHLLAGFCVWVVLGWVGGSVPNLGPAEQEQNHYLAQLFGLYGENGTLTAGGLARLLHSLGLGRVQGLRLGQHGPLTGRAASPAADNSTHRPQNPELSVDVWAGMPLGPSGWGDLEESKAPHLPRGPAPSGLDLLHRLLLLDHSLADHLNEDCLNGSQLLVNFGLSPAAPLTPRQFALLCPALLYQIDSRVCIGAPAPAPPGDLLSALLQSALAVLLLSLPSPLSLLLLRLLGPRLLRPLLGFLGALAVGTLCGDALLHLLPHAQEGRHAGPGGLPEKDLGPGLSVLGGLFLLFVLENMLGLLRHRGLRPRCCRRKRRNLETRNLDPENGSGMALQPLQAAPEPGAQGQREKNSQHPPALAPPGHQGHSHGHQGGTDITWMVLLGDGLHNLTDGLAIGAAFSDGFSSGLSTTLAVFCHELPHELGDFAMLLQSGLSFRRLLLLSLVSGALGLGGAVLGVGLSLGPVPLTPWVFGVTAGVFLYVALVDMLPALLRPPEPLPTPHVLLQGLGLLLGGGLMLAITLLEERLLPVTTEG

SEQ ID NO: 12394 - protein, 540 aa, Homo Sapiens; identical to SEQ ID NO: 12393

SEQ ID NO: 12395 - protein, 685 aa, Homo Sapiens
MAEDKSKRDSIEMSMKGCQTNNGFVHNEDILEQTPDPGSSTDNLKHSTRGILGSQEPDFKGVQPYAGMPKEVLFQFSGQARYRIPREILFWLTVASVLVLIAATIAIIALSPKCLDWWQEGPMYQIYPRSFKDSNKDGNGDLKGIQDKLDYITALNIKTVWITSFYKSSLKDFRYGVEDFREVDPIFGTMEDFENLVAAIHDKGLKLIIDFIPNHTSDKHIWFQLSRTRTGKYTDYYIWHDCTHENGKTIPPNNWLSVYGNSSWHFDEVRNQCYFHQFMKEQPDLNFRNPDVQEEIKEILRFWLTKGVDGFSLDAVKFLLEAKHLRDEIQVNKTQIPDTVTQYSELYHDFTTTQVGMHDIVRSFRQTMDQYSTEPGRYRFMGTEAYAESIDRTVMYYGLPFIQEADFPFNNYLSMLDTVSGNSVYEVITSWMENMPEGKWPNWMIGGPDSSRLTSRLGNQYVNVMNMLLFTLPGTPITYYGEEIGMGNIVAANLNESYDINTLRSKSPMQWDNSSNAGFSEASNTWLPTNSDYHTVNVDVQKTQPRSALKLYQDLSLLHANELLLNRGWFCHLRNDSHYVVYTRELDGIDRIFIVVLNFGESTLLNLHNMISGLPAKMRIRLSTNSADKGSKVDTSGIFLDKGEGLIFEHNTKNLLHRQTAFRDRCFVSNRACYSSVLNILYTSC

SEQ ID NO: 12396 - protein, 564 aa, Homo Sapiens
MAEDKSKRDSIEMSMKGCQTNNGFVHNEDILEQTPDPGSSTDNLKHSTRGILGSQEPDFKGVQPYAGMPKEVLFQFSGQARYRIPREILFWLTVASVLVLIAATIAIIALSPKCLDWWQEGPMYQIYPRSFKDSNKDGNGDLKGIQDKLDYITALNIKTVWITSFYKSSLKDFRYGVEDFREVDPIFGTMEDFENLVAAIHDKGLKLIIDFIPNHTSDKHIWFQLSRTRTGKYTDYYIWHDCTHENGKTIPPNNWLSVYGNSSWHFDEVRNQCYFHQFMKEQPDLNFRNPDVQEEIKEILRFWLTKGVDGFSLDAVKFLLEAKHLRDEIQVNKTQIPDTVTQYSELYHDFTTTQVGMHDIVRSFRQTMDQYSTEPGRYRFMGTEAYAESIDRTVMYYGLPFIQEADFPFNNYLSMLDTVSGNSVYEVITSWMENMPEGKWPNWMIGGPDSSRLTSRLGNQYVNVMNMLLFTLPGTPITYYGEEIGMGNIVAANLNESYDINTLRSKSPMQWDNSSNAGFSEASNTWLPTNSDYHTVNVDVSISENFMLILETKKWVSTESTHSP

SEQ ID NO: 12397 - protein, 564 aa, Homo Sapiens
MAEDKSKRDSIEMSMKGCQTNNGFVHNEDILEQTPDPGSSTDNLKHSTRGILGSQEPDFKGVQPYAGMPKEVLFQFSGQARYRIPREILFWLTVASVLVLIAATIAIIALSPKCLDWWQEGPMYQIYPRSFKDSNKDGNGDLKGIQDKLDYITALNIKTVWITSFYKSSLKDFRYGVEDFREVDPIFGTMEDFENLVAAIHDKGLKLIIDFIPNHTSDKHIWFQLSRTRTGKYTDYYIWHDCTHENGKTIPPNNWLSVYGNSSWHFDEVRNQCYFHQFMKEQPDLNFRNPDVQEEIKEILRFWLTKGVDGFSLDAVKFLLEAKHLRDEIQVNKTQIPDTVTQYSELYHDFTTTQVGMHDIVRSFRQTMDQYSTEPGRYRFMGTEAYAESIDRTVMYYGLPFIQEADFPFNNYLSMLDTVSGNSVYEVITSWMENMPEGKWPNWMIGGPDSSRLTSRLGNQYVNVMNMLLFTLPGTPITYYGEEIGMGNIVAANLNESYDINTLRSKSPMQWDNSSNAGFSEASNTWLPTNSDYHTVNVDSCSVTHARVQWRDLGTLQPLLPGFK

SEQ ID NO: 12398 - protein, 502 aa, Homo Sapiens
MAEDKSKRDSIEMSMKGCQTNNGFVHNEDILEQTPDPGSSTDNLKHSTRGILGSQEPDFKGVQPYAGMPKEVLFQFSGQARYRIPREILFWLTVASVLVLIAATIAIIALSPKCLDWWQEGPMYQIYPRSFKDSNKDGNGDLKGIQDKLDYITALNIKTVWITSFYKSSLKDFRYGVEDFREVDPIFGTMEDFENLVAAIHDKGLKLIIDFIPNHTSDKHIWFQLSRTRTGKYTDYYIWHDCTHENGKTIPPNNWLSVYGNSSWHFDEVRNQCYFHQFMKEQPDLNFRNPDVQEEIKEILRFWLTKGVDGFSLDAVKFLLEAKHLRDEIQVNKTQIPDTVTQYSELYHDFTTTQVGMHDIVRSFRQTMDQYSTEPGRYRFMGTEAYAESIDRTVMYYGLPFIQEADFPFNNYLSMLDTVSGNSVYEVITSWMENMPEGKWPNWMIGGPDSSRLTSRLGNQYVNVMNMLLFTLPGTPITYYGEEIGMGNIVAANLNESYDIVS

SEQ ID NO: 12399 - protein, 391 aa, Homo Sapiens
MAEDKSKRDSIEMSMKGCQTNNGFVHNEDILEQTPDPGSSTDNLKHSTRGILGSQEPDFKGVQPYAGMPKEVLFQFSGQARYRIPREILFWLTVASVLVLIAATIAIIALSPKCLDWWQEGPMYQIYPRSFKDSNKDGNGDLKGIQDKLDYITALNIKTVWITSFYKSSLKDFRYGVEDFREVDPIFGTMEDFENLVAAIHDKGLKLIIDFIPNHTSDKHIWFQLSRTRTGKYTDYYIWHDCTHENGKTIPPNNWLSVYGNSSWHFDEVRNQCYFHQFMKEQPDLNFRNPDVQEEIKEILRFWLTKGVDGFSLDAVKFLLEAKHLRDEIQVNKTQIPDTVTQYSELYHDFTTTQVGMHDIVRSFRQTMDQYSTEPGRYRLTTAYALISSQA

SEQ ID NO: 12400 - protein, 552 aa, Homo Sapiens
MAEDKSKRDSIEMSMKGCQTNNGFVHNEDILEQTPDPGSSTDNLKHSTRGILGSQEPDFKGVQPYAGMPKEVLFQFSGQARYRIPREILFWLTVASVLVLIAATIAIIALSPKCLDWWQEGPMYQIYPRSFKDSNKDGNGDLKGIQDKLDYITALNIKTVWITSFYKSSLKDFRYGVEDFREVDPIFGTMEDFENLVAAIHDKGLKLIIDFIPNHTSDKHIWFQLSRTRTGKYTDYYIWHDCTHENGKTIPPNNWLSVYGNSSWHFDEVRNQCYFHQFMKEQPDLNFRNPDVQEEIKEILRFWLTKGVDGFSLDAVKFLLEAKHLRDEIQVNKTQIPDTVTQYSELYHDFTTTQVGMHDIVRSFRQTMDQYSTEPGRYRFMGTEAYAESIDRTVMYYGLPFIQEADFPFNNYLSMLDTVSGNSVYEVITSWMENMPEGKWPNWMIGGPDSSRLTSRLGNQYVNVMNMLLFTLPGTPITYYGEEIGMGNIVAANLNESYDINTLRSKSPMQWDNSSNAGFSEASNTWLPTNSDYHTVNVDVILLRHPCSSAVA

SEQ ID NO: 12401 - protein, 184 aa, Homo Sapiens
MGTEAYAESIDRTVMYYGLPFIQEADFPFNNYLSMLDTVSGNSVYEVITSWMENMPEGKWPNWMIGGPDSSRLTSRLGNQYVNVMNMLLFTLPGTPITYYGEEIGMGNIVAANLNESYDINTLRSKSPMQWDNSSNAGFSEASNTWLPTNSDYHTVNVDVSISENFMLILETKKWVSTESTHSP

SEQ ID NO: 12402 - protein, 407 aa, Homo Sapiens
MKEQPDLNFRNPDVQEEIKEILRFWLTKGVDGFSLDAVKFLLEAKHLRDEIQVNKTQIPDTVTQYSELYHDFTTTQVGMHDIVRSFRQTMDQYSTEPGRYRFMGTEAYAESIDRTVMYYGLPFIQEADFPFNNYLSMLDTVSGNSVYEVITSWMENMPEGKWPNWMIGGPDSSRLTSRLGNQYVNVMNMLLFTLPGTPITYYGEEIGMGNIVAANLNESYDINTLRSKSPMQWDNSSNAGFSEASNTWLPTNSDYHTVNVDVQKTQPRSALKLYQDLSLLHANELLLNRGWFCHLRNDSHYVVYTRELDGIDRIFIVVLNFGESTLLNLHNMISGLPAKMRIRLSTNSADKGSKVDTSGIFLDKGEGLIFEHNTKNLLHRQTAFRDRCFVSNRACYSSVLNILYTSC

SEQ ID NO: 12403 - protein, 143 aa, Homo Sapiens
MSGMFLSSKLTTILLLFTNKSLDPGQKIQENTLLSVYGNSSWHFDEVRNQCYFHQFMKEQPDLNFRNPDVQEEIKEILRFWLTKGVDGFSLDAVKFLLEAKHLRDEIQVNKTQIPDTVTQYSELYHDFTTTQVGMHDIVRSFR

SEQ ID NO: 12404 - protein, 316 aa, Homo Sapiens
MTLNLVNSYRFMGTEAYAESIDRTVMYYGLPFIQEADFPFNNYLSMLDTVSGNSVYEVITSWMENMPEGKWPNWMIGGPDSSRLTSRLGNQYVNVMNMLLFTLPGTPITYYGEEIGMGNIVAANLNESYDINTLRSKSPMQWDNSSNAGFSEASNTWLPTNSDYHTVNVDVQKTQPRSALKLYQDLSLLHANELLLNRGWFCHLRNDSHYVVYTRELDGIDRIFIVVLNFGESTLLNLHNMISGLPAKMRIRLSTNSADKGSKVDTSGIFLDKGEGLIFEHNTKNLLHRQTAFRDRCFVSNRACYSSVLNILYTSC

SEQ ID NO: 12405 - protein, 340 aa, Homo Sapiens
MEPGRTQIKLDPRYTADLLEVLKTNYGIPSACFSQPPTAAQLLRALGPVELALTSILTLLALGSIAIFLEDAVYLYKNTLCPIKRRTLLWKSSAPTVVSVLCCFGLWIPRSLVLVEMTITSFYAVCFYLLMLVMVEGFGGKEAVLRTLRDTPMMVHTGPCCCCCPCCPRLLLTRKKLQLLMLGPFQYAFLKITLTLVGLFLVPDGIYDPADISEGSTALWINTFLGVSTLLALWTLGIISRQARLHLGEQNMGAKFALFQVLLILTALQPSIFSVLANGGQIACSPPYSSKTRSQVMNCHLLILETFLMTVLTRMYYRRKDHKVGYETFSSPDLDLNLKA

SEQ ID NO: 12406 - protein, 58 aa, Homo Sapiens
MEPGRTQIKLDPRYTADLLEVLKTNYGIPSACFSQPPTAAQLLRDRVWLCGPGWSAVV

SEQ ID NO: 12407 - protein, 66 aa, Homo Sapiens
MLLILMLSLSFNEQASHPAPGPHLPAPPALPHPGACGIAGENAAMEPGRTQIKLDPRYTADLLEVL

SEQ ID NO: 12408 - protein, 23 aa, Homo Sapiens
QARLHLGEQNMGAKFALFQQQHG

SEQ ID NO: 12409 - protein, 212 aa, Homo Sapiens
  misc_feature (1)..(1): Xaa can be any naturally occurring amino acid
XACFSQPPTAAQLLRALGPVELALTSILTLLALGSIAIFLEDAVYLYKNTLCPIKRRTLLWKSSAPTLATFKERCLECVGFASCVLAAKGFRSLRVSLPPSPAPAPSEQVVSVLCCFGLWIPRSLVLVEMTITSFYAVCFYLLMLVMVEGFGGKEAVLRTLRDTPMMVHTGPCCCCCPCCPRLLLTRKKLQLLMLGPFQYAFLKITLTLVGL

SEQ ID NO: 12410 - protein, 175 aa, Homo Sapiens
MAAPTPARPVLTHLLVALFGMGSWAAVNGIWVELPVVVKELPEAAAFQGLLLLLPPPPSVPTGELGSGLQVGAPGAEEEVEESSPLQEPPSQAAGTTPGPDPKAYQLLSARSACLLGLLAATNALTNGVLPAVQSFSCLPYGRLAYHLAVVLGSAANPLACFLAMGVLCRSLAGL

SEQ ID NO: 12411 - protein, 111 aa, Homo Sapiens
MAAPTPARPVLTHLLVALFGMGSWAAVNGIWVELPVVVKELPEGAVVGAVSWRVLLREGGSQLPAAWRGPAGIAGSRRGHPGGLSARRCCYVPPDQHLSRVPQQKGLCRPL

SEQ ID NO: 12412 - protein, 69 aa, Homo Sapiens
MAAPTPARPVLTHLLVALFGMGSWAAVNGIWVELPVVVKELPEGWSLPSYVSVLVALGNLGLLVVTLWR

SEQ ID NO: 12413 - protein, 87 aa, Homo Sapiens
MAAPTPARPVLTHLLVALFGMGSWAAVNGIWVELPVVVKELPEGWSLPSYVSVLVALGNLGLLVVTLWRRLAPGKDEQVPIRVVQGS

SEQ ID NO: 12414 - protein, 172 aa, Homo Sapiens
MAAPTPARPVLTHLLVALFGMGSWAAVNGIWVELPVVVKELPEGWSLPSYVSVLVALGNLGLLVVTLWRRLAPGKDEQVPIRVVQVLGMVGTALLASLWHHVAPVAGQLHSVAFLALAFVLALACCASNVTFLPFLSHLPPRFLRSFFLGQGLSALLPCVLALVQGVGRLEC

SEQ ID NO: 12415 - protein, 445 aa, Homo Sapiens
MAAPTPARPVLTHLLVALFGMGSWAAVNGIWVELPVVVKELPEGWSLPSYVSVLVALGNLGLLVVTLWRRLAPGKDEQVPIRVVQVLGMVGTALLASLWHHVAPVAGQLHSVAFLALAFVLALACCASNVTFLPFLSHLPPRFLRSFFLGQGLSALLPCVLALVQGVGRLECPPAPINGTPGPPLDFLERFPASTFFWALTALLVASAAAFQGLLLLLPPPPSVPTGELGSGLQVGAPGAEEEVEESSPLQEPPSQAAGTTPGPDPKAYQLLSARSACLLGLLAATNALTNGVLPAVQSFSCLPYGRLAYHLAVVLGSAANPLACFLAMGVLCRSLAGLGGLSLLGVFCGGYLMALAVLSPCPPLVGTSAGVVLVVLSWVLCLGVFSYVKVAASSLLHGGGRPALLAAGVAIQVGSLLGAVAMFPPTSIYHVFHSRKDCADPCDS

SEQ ID NO: 12416 - protein, 445 aa, Homo Sapiens; identical to SEQ ID NO: 12415

SEQ ID NO: 12417 - protein, 445 aa, Homo Sapiens; identical to SEQ ID NO: 12415

SEQ ID NO: 12418 - protein, 445 aa, Homo Sapiens; identical to SEQ ID NO: 12415

SEQ ID NO: 12419 - protein, 445 aa, Homo Sapiens; identical to SEQ ID NO: 12415

SEQ ID NO: 12420 - protein, 445 aa, Homo Sapiens; identical to SEQ ID NO: 12415

SEQ ID NO: 12421 - protein, 27 aa, Homo Sapiens
MSVGVSTSAPLSPTSGTSVGMSTFSIM

SEQ ID NO: 12422 - protein, 39 aa, Homo Sapiens
MSVGVSTSAPLSPTSGTSVGMSTFSIMDYVVFVLLLVLS

SEQ ID NO: 12423 - protein, 59 aa, Homo Sapiens
MSVGVSTSAPLSPTSGTSVGMSTFSIMDYVVFVLLLVLSLAIGLYHACRGWGRHTVGEL

SEQ ID NO: 12424 - protein, 78 aa, Homo Sapiens
MSVGVSTSAPLSPTSGTSVGMSTFSIMDYVVFVLLLVLSLAIGLYHACRGWGRHTVGELLMADRKMGCLPVALSLLAT

SEQ ID NO: 12425 - protein, 115 aa, Homo Sapiens
MSVGVSTSAPLSPTSGTSVGMSTFSIMDYVVFVLLLVLSLAIGLYHACRGWGRHTVGELLMADRKMGCLPVALSLLATFQSAVAILGVPSEIYRFGTQYWFLGCCYFLGLLIPAH

SEQ ID NO: 12426 - protein, 133 aa, Homo Sapiens
MSVGVSTSAPLSPTSGTSVGMSTFSIMDYVVFVLLLVLSLAIGLYHACRGWGRHTVGELLMADRKMGCLPVALSLLATFQSAVAILGVPSEIYRFGTQYWFLGCCYFLGLLIPAHIFIPVFYRLHLTSAYEYL

SEQ ID NO: 12427 - protein, 147 aa, Homo Sapiens
MSVGVSTSAPLSPTSGTSVGMSTFSIMDYVVFVLLLVLSLAIGLYHACRGWGRHTVGELLMADRKMGCLPVALSLLATFQSAVAILGVPSEIYRFGTQYWFLGCCYFLGLLIPAHIFIPVFYRLHLTSAYEYLELRFNKTVRVCGTV

SEQ ID NO: 12428 - protein, 153 aa, Homo Sapiens
MSVGVSTSAPLSPTSGTSVGMSTFSIMDYVVFVLLLVLSLAIGLYHACRGWGRHTVGELLMADRKMGCLPVALSLLATFQSAVAILGVPSEIYRFGTQYWFLGCCYFLGLLIPAHIFIPVFYRLHLTSAYEYLELRFNKTVRVCGTVTFIFQM

SEQ ID NO: 12429 - protein, 193 aa, Homo Sapiens
MSVGVSTSAPLSPTSGTSVGMSTFSIMDYVVFVLLLVLSLAIGLYHACRGWGRHTVGELLMADRKMGCLPVALSLLATFQSAVAILGVPSEIYRFGTQYWFLGCCYFLGLLIPAHIFIPVFYRLHLTSAYEYLELRFNKTVRVCGTVTFIFQMVIYMGVVLYAPSLALNAVTGFDLWLSVLALGIVCTVYTAL

SEQ ID NO: 12430 - protein, 635 aa, Homo Sapiens
MSVGVSTSAPLSPTSGTSVGMSTFSIMDYVVFVLLLVLSLAIGLYHACRGWGRHTVGELLMADRKMGCLPVALSLLATFQSAVAILGVPSEIYRFGTQYWFLGCCYFLGLLIPAHIFIPVFYRLHLTSAYEYLELRFNKTVRVCGTVTFIFQMVIYMGVVLYAPSLALNAVTGFDLWLSVLALGIVCTVYTALGGLKAVIWTDVFQTLVMFLGQLAVIIVGSAKVGGLGRVWAVASQHGRISGFELDPDPFVRHTFWTLAFGGVFMMLSLYGVNQAQVQRYLSSRTEKAAVLSCYAVFPFQQVSLCVGCLIGLVMFAYYQEYPMSIQQAQAAPDQFVLYFVMDLLKGLPGLPGLFIACLFSGSLSTISSAFNSLATVTMEDLIRPWFPEFSEARAIMLSRGLAFGYGLLCLGMAYISSQMGPVLQAAISIFGMVGGPLLGLFCLGMFFPCANPPGAVVGLLAGLVMAFWIGIGSIVTSMGSSMPPSPSNGSSFSLPTNLTVATVTTLMPLTTFSKPTGLQRFYSLSYLWYSAHNSTTVIVVGLIVSLLTGRMRGRSLNPATIYPVLPKLLSLLPLSCQKRLHCRSYGQDHLDTGLFPEKPRNGVLGDSRDKEAMALDGTAYQGSSSTCILQETSL

SEQ ID NO: 12431 - protein, 635 aa, Homo Sapiens; identical to SEQ ID NO: 12430

SEQ ID NO: 12432 - protein, 574 aa, Homo Sapiens
MFPYFIMLIFCGIPLFFMELSFGQFASQGCLGVWRISPMFKGVGYGMMVVSTYIGIYYNVVICIAFYYFFSSMTHVLPWAYCNNPWNTHDCAGVLDASNLTNGSRPAALPSNLSHLLNHSLQRTSPSEEYWRLYVLKLSDDIGNFGEVRLPLLGCLGVSWLVVFLCLIRGVKSSGKVVYFTATFPYVVLTILFVRGVTLEGAFDGIMYYLTPQWDKILEAKVWGDAASQIFYSLGCAWGGLITMASYNKFHNNCYRDSVIISITNCATSVYAGFVIFSILGFMANHLGVDVSRVADHGPGLAFVAYPEALTLLPISPLWSLLFFFMLILLGLGTQFCLLETLVTAIVDEVGNEWILQKKTYVTLGVAVAGFLLGIPLTSQAGIYWLLLMDNYAASFSLVVISCIMCVAIMYIYGHRNYFQDIQMMLGFPPPLFFQICWRFVSPAIIFLQAQVHRRLPQNPLHFASLPERNVLLHQLPQRGGVPEHDPPTPPSPARTYGPQVRVREVPRARRQRSPNPAPLWAPPSPKPHPCSAAGPLGWDCPFRNCQSLALSSARLLADSDAGGPETRQWEPGP

SEQ ID NO: 12433 - protein, 522 aa, Homo Sapiens
MMVVSTYIGIYYNVVICIAFYYFFSSMTHVLPWAYCNNPWNTHDCAGVLDASNLTNGSRPAALPSNLSHLLNHSLQRTSPSEEYWRLYVLKLSDDIGNFGEVRLPLLGCLGVSWLVVFLCLIRGVKSSGKVVYFTATFPYVVLTILFVRGVTLEGAFDGIMYYLTPQWDKILEAKVWGDAASQIFYSLGCAWGGLITMASYNKFHNNCYRDSVIISITNCATSVYAGFVIFSILGFMANHLGVDVSRVADHGPGLAFVAYPEALTLLPISPLWSLLFFFMLILLGLGTQFCLLETLVTAIVDEVGNEWILQKKTYVTLGVAVAGFLLGIPLTSQAGIYWLLLMDNYAASFSLVVISCIMCVAIMYIYGHRNYFQDIQMMLGFPPPLFFQICWRFVSPAIIFFILVFTVIQYQPITYNHYQYPGWAVAIGFLMALSSVLCIPLYAMFRLCRTDGDTLLQRLKNATKPSRDWGPALLEHRTGRYAPTIAPSPEDGFEVQPLHPDKAQIPIVGSNGSSRLQDSRI

SEQ ID NO: 12434 - protein, 134 aa, Homo Sapiens
MSGGDTRAAIARPRMAAAHGPVAPSSPEQNGAVPSEATKRDQNLKRGNWGNQIEFVLTSVGYAVGLGNVWRFPYLCYRNGGGAFMFPYFIMLIFCGIPLFFMELSFGQFASQGCLGVWRISPMFKGVGYGMMVV

SEQ ID NO: 12435 - protein, 652 aa, Homo Sapiens
MSGGDTRAAIARPRMAAAHGPVAPSSPEQNGAVPSEATKRDQNLKRGNWGNQIEFVLTSVGYAVGLGNVWRFPYLCYRNGGGAFMFPYFIMLIFCGIPLFFMELSFGQFASQGCLGVWRISPMFKGVGYGMMVVSTYIGIYYNVVICIAFYYFFSSMTHVLPWAYCNNPWNTHDCAGVLDASNLTNGSRPAALPSNLSHLLNHSLQRTSPSEEYWRLYVLKLSDDIGNFGEVRLPLLGCLGVSWLVVFLCLIRGVKSSGKVVYFTATFPYVVLTILFVRGVTLEGAFDGIMYYLTPQWDKILEAKVWGDAASQIFYSLGCAWGGLITMASYNKFHNNCYRDSVIISITNCATSVYAGFVIFSILGFMANHLGVDVSRVADHGPGLAFVAYPEALTLLPISPLWSLLFFFMLILLGLGTQFCLLETLVTAIVDEVGNEWILQKKTYVTLGVAVAGFLLGIPLTSQAGIYWLLLMDNYAASFSLVVISCIMCVAIMYIYGHRNYFQDIQMMLGFPPPLFFQICWRFVSPAIIFFILVFTVIQYQPITYNHYQYPGWAVAIGFLMALSSVLCIPLYAMFRLCRTDGDTLLQRLKNATKPSRDWGPALLEHRTGRYAPTIAPSPEDGFEVQPLHPDKAQIPIVGSNGSSRLQDSRI

SEQ ID NO: 12436 - protein, 706 aa, Homo Sapiens
MSGGDTRAAIARPRMAAAHGPVAPSSPEQVTLLPVQRSFFLPPFSGATPSTSLAESVLKVWHGAYNSGLLPQLMAQHSLAMAQNGAVPSEATKRDQNLKRGNWGNQIEFVLTSVGYAVGLGNVWRFPYLCYRNGGGAFMFPYFIMLIFCGIPLFFMELSFGQFASQGCLGVWRISPMFKGVGYGMMVVSTYIGIYYNVVICIAFYYFFSSMTHVLPWAYCNNPWNTHDCAGVLDASNLTNGSRPAALPSNLSHLLNHSLQRTSPSEEYWRLYVLKLSDDIGNFGEVRLPLLGCLGVSWLVVFLCLIRGVKSSGKVVYFTATFPYVVLTILFVRGVTLEGAFDGIMYYLTPQWDKILEAKVWGDAASQIFYSLGCAWGGLITMASYNKFHNNCYRDSVIISITNCATSVYAGFVIFSILGFMANHLGVDVSRVADHGPGLAFVAYPEALTLLPISPLWSLLFFFMLILLGLGTQFCLLETLVTAIVDEVGNEWILQKKTYVTLGVAVAGFLLGIPLTSQAGIYWLLLMDNYAASFSLVVISCIMCVAIMYIYGHRNYFQDIQMMLGFPPPLFFQICWRFVSPAIIFFILVFTVIQYQPITYNHYQYPGWAVAIGFLMALSSVLCIPLYAMFRLCRTDGDTLLQRLKNATKPSRDWGPALLEHRTGRYAPTIAPSPEDGFEVQPLHPDKAQIPIVGSNGSSRLQDSRI

SEQ ID NO: 12437 - protein, 633 aa, Homo Sapiens
MVGKGAKGMLNGAVPSEATKRDQNLKRGNWGNQIEFVLTSVGYAVGLGNVWRFPYLCYRNGGGAFMFPYFIMLIFCGIPLFFMELSFGQFASQGCLGVWRISPMFKGVGYGMMVVSTYIGIYYNVVICIAFYYFFSSMTHVLPWAYCNNPWNTHDCAGVLDASNLTNGSRPAALPSNLSHLLNHSLQRTSPSEEYWRLYVLKLSDDIGNFGEVRLPLLGCLGVSWLVVFLCLIRGVKSSGKVVYFTATFPYVVLTILFVRGVTLEGAFDGIMYYLTPQWDKILEAKVWGDAASQIFYSLGCAWGGLITMASYNKFHNNCYRDSVIISITNCATSVYAGFVIFSILGFMANHLGVDVSRVADHGPGLAFVAYPEALTLLPISPLWSLLFFFMLILLGLGTQFCLLETLVTAIVDEVGNEWILQKKTYVTLGVAVAGFLLGIPLTSQAGIYWLLLMDNYAASFSLVVISCIMCVAIMYIYGHRNYFQDIQMMLGFPPPLFFQICWRFVSPAIIFFILVFTVIQYQPITYNHYQYPGWAVAIGFLMALSSVLCIPLYAMFRLCRTDGDTLLQRLKNATKPSRDWGPALLEHRTGRYAPTIAPSPEDGFEVQPLHPDKAQIPIVGSNGSSRLQDSRI

SEQ ID NO: 12438 - protein, 579 aa, Homo Sapiens
MVGKGAKGMLNGAVPSEATKRDQNLKRGNWGNQIEFVLTSVGYAVGLGNVWRFPYLCYRNGGGAFMFPYFIMLIFCGIPLFFMELSFGQFASQGCLGVWRISPMFKGVGYGMMVVSTYIGIYYNVVICIAFYYFFSSMTHVLPWAYCNNPWNTHDCAGVLDASNLTNGSRPAALPSNLSHLLNHSLQRTSPSEEYWRLYVLKLSDDIGNFGEVRLPLLGCLGVSWLVVFLCLIRGVKSSGKVVYFTATFPYVVLTILFVRGVTLEGAFDGIMYYLTPQWDKILEAKVWGDAASQIFYSLGCAWGGLITMASYNKFHNNCYRDSVIISITNCATSVYAGFVIFSILGFMANHLGVDVSRVADHGPGLAFVAYPEALTLLPISPLWSLLFFFMLILLGLGTQFCLLETLVTAIVDEVGNEWILQKKTYVTLGVAVAGFLLGIPLTSQAGIYWLLLMDNYAASFSLVVISCIMCVAIMYIYGEHSSLRPPATRPLARPLCPAGLLTPHLSRAPELLPGHPDDAGIPTTPLLSDLLALRLSRHHLPPGSGPPPPPPESSSLRVAPGAERAPPPAPTARGSAGA

SEQ ID NO: 12439 - protein, 116 aa, Homo Sapiens
MVGKGAKGMLVTLLPVQRSFFLPPFSGATPSTSLAESVLKVWHGAYNSGLLPQLMAQHSLAMAQNGAVPSEATKRDQNLKRGNWGNQIEFVLTSVGYAVGLGNVWRFPYLCYRNGG

SEQ ID NO: 12440 - protein, 664 aa, Homo Sapiens
MRRLSLSPTFSMGFHLLVTVSLLFSHVDHVIAETEMEGEGNETGECTGSYYCKKGVILPIWEPQDPSFGDKIARATVYFVAMVYMFLGVSIIADRFMSSIEVITSQEKEITIKKPNGETTKTTVRIWNETVSNLTLMALGSSAPEILLSVIEVCGHNFTAGDLGPSTIVGSAAFNMFIIIALCVYVVPDGETRKIKHLRVFFVTAAWSIFAYTWLYIILSVISPGVVEVWEGLLTFFFFPICVVFAWVADRRLLFYKYVYKRYRAGKQRGMIIEHEGDRPSSKTEIEMDGKVVNSHVENFLDGALVLEVDERDQDDEEARREMARILKELKQKHPDKEIEQLIELANYQVLSQQQKSRAFYRIQATRLMTGAGNILKRHAADQARKAVSMHEVNTEVTENDPVSKIFFEQGTYQCLENCGTVALTIIRRGGDLTNTVFVDFRTEDGTANAGSDYEFTEGTVVFKPGDTQKEIRVGIIDDDIFEEDENFLVHLSNVKVSSEASEDGILEANHVSTLACLGSPSTATVTIFDDDHAGIFTFEEPVTHVSESIGIMEVKVLRTSGARGNVIVPYKTIEGTARGGGEDFEDTCGELEFQNDEIVKTISVKVIDDEEYEKNKTFFLEIGEPRLVEMSEKKGRSLPLEYLTVRNMRKSAVSPLCLRNQNG

SEQ ID NO: 12441 - protein, 73 aa, Homo Sapiens
MYNMRRLSLSPTFSMGFHLLVTVSLLFSHVDHVIAETEMEGEGNETGECTGSYYCKKGVILPIWEPQDPSFGD

SEQ ID NO: 12442 - protein, 87 aa, Homo Sapiens
MYNMRRLSLSPTFSMGFHLLVTVSLLFSHVDHVIAETEMEGEGNETGECTGSYYCKKGVILPIWEPQDPSFGDKIARATVYFVAMVY

SEQ ID NO: 12443 - protein, 87 aa, Homo Sapiens; identical to SEQ ID NO: 12442

SEQ ID NO: 12444 - protein, 973 aa, Homo Sapiens
MYNMRRLSLSPTFSMGFHLLVTVSLLFSHVDHVIAETEMEGEGNETGECTGSYYCKKGVILPIWEPQDPSFGDKIARATVYFVAMVYMFLGVSIIADRFMSSIEVITSQEKEITIKKPNGETTKTTVRIWNETVSNLTLMALGSSAPEILLSVIEVCGHNFTAGDLGPSTIVGSAAFNMFIIIALCVYVVPDGETRKIKHLRVFFVTAAWSIFAYTWLYIILSVISPGVVEVWEGLLTFFFFPICVVFAWVADRRLLFYKYVYKRYRAGKQRGMIIEHEGDRPSSKTEIEMDGKVVNSHVENFLDGALVLEVDERDQDDEEARREMARILKELKQKHPDKEIEQLIELANYQVLSQQQKSRAFYRIQATRLMTGAGNILKRHAADQARKAVSMHEVNTEVTENDPVSKIFFEQGTYQCLENCGTVALTIIRRGGDLTNTVFVDFRTEDGTANAGSDYEFTEGTVVFKPGDTQKEIRVGIIDDDIFEEDENFLVHLSNVKVSSEASEDGILEANHVSTLACLGSPSTATVTIFDDDHAGIFTFEEPVTHVSESIGIMEVKVLRTSGARGNVIVPYKTIEGTARGGGEDFEDTCGELEFQNDEIVKTISVKVIDDEEYEKNKTFFLEIGEPRLVEMSEKKALLLNELGGFTITGKYLFGQPVFRKVHAREHPILSTVITIADEYDDKQPLTSKEEEERRIAEMGRPILGEHTKLEVIIEESYEFKSTVDKLIKKTNLALVVGTNSWREQFIEAITVSAGEDDDDDECGEEKLPSCFDYVMHFLTVFWKVLFAFVPPTEYWNGWACFIVSILMIGLLTAFIGDLASHFGCTIGLKDSVTAVVFVALGTSVPDTFASKVAATQDQYADASIGNVTGSNAVNVFLGIGVAWSIAAIYHAANGEQFKVSPGTLAFSVTLFTIFAFINVGVLLYRRRPEIGGELGGPRTAKLLTSCLFVLLWLLYIFFSSLEAYCHIKGF

SEQ ID NO: 12445 - protein, 968 aa, Homo Sapiens
MYNMRRLSLSPTFSMGFHLLVTVSLLFSHVDHVIAETEMEGEGNETGECTGSYYCKKGVILPIWEPQDPSFGDKIARATVYFVAMVYMFLGVSIIADRFMSSIEVITSQEKEITIKKPNGETTKTTVRIWNETVSNLTLMALGSSAPEILLSVIEVCGHNFTAGDLGPSTIVGSAAFNMFIIIALCVYVVPDGETRKIKHLRVFFVTAAWSIFAYTWLYIILSVISPGVVEVWEGLLTFFFFPICVVFAWVADRRLLFYKYVYKRYRAGKQRGMIIEHEGDRPSSKTEIEMDGKVVNSHVENFLDGALVLEVDERDQDDEEARREMARILKELKQKHPDKEIEQLIELANYQVLSQQQKSRAFYRIQATRLMTGAGNILKRHAADQARKAVSMHEVNTEVTENDPVSKIFFEQGTYQCLENCGTVALTIIRRGGDLTNTVFVDFRTEDGTANAGSDYEFTEGTVVFKPGDTQKEIRVGIIDDDIFEEDENFLVHLSNVKVSSEASEDGILEANHVSTLACLGSPSTATVTIFDDDHAGIFTFEEPVTHVSESIGIMEVKVLRTSGARGNVIVPYKTIEGTARGGGEDFEDTCGELEFQNDEIVKTISVKVIDDEEYEKNKTFFLEIGEPRLVEMSEKKALLLNELGGFTITGQPVFRKVHAREHPILSTVITIADEYDDKQPLTSKEEEERRIAEMGRPILGEHTKLEVIIEESYEFKSTVDKLIKKTNLALVVGTNSWREQFIEAITVSAGEDDDDDECGEEKLPSCFDYVMHFLTVFWKVLFAFVPPTEYWNGWACFIVSILMIGLLTAFIGDLASHFGCTIGLKDSVTAVVFVALGTSVPDTFASKVAATQDQYADASIGNVTGSNAVNVFLGIGVAWSIAAIYHAANGEQFKVSPGTLAFSVTLFTIFAFINVGVLLYRRRPEIGGELGGPRTAKLLTSCLFVLLWLLYIFFSSLEAYCHIKGF

SEQ ID NO: 12446 - protein, 937 aa, Homo Sapiens
MYNMRRLSLSPTFSMGFHLLVTVSLLFSHVDHVIAETEMEGEGNETGECTGSYYCKKGVILPIWEPQDPSFGDKIARATVYFVAMVYMFLGVSIIADRFMSSIEVITSQEKEITIKKPNGETTKTTVRIWNETVSNLTLMALGSSAPEILLSVIEVCGHNFTAGDLGPSTIVGSAAFNMFIIIALCVYVVPDGETRKIKHLRVFFVTAAWSIFAYTWLYIILSVISPGVVEVWEGLLTFFFFPICVVFAWVADRRLLFYKYVYKRYRAGKQRGMIIEHEGDRPSSKTEIEMDGKVVNSHVENFLDGALVLEVDERDQDDEEARREMARILKELKQKHPDKEIEQLIELANYQVLSQQQKSRAFYRIQATRLMTGAGNILKRHAADQARKAVSMHEVNTEVTENDPVSKIFFEQGTYQCLENCGTVALTIIRRGGDLTNTVFVDFRTEDGTANAGSDYEFTEGTVVFKPGDTQKEIRVGIIDDDIFEEDENFLVHLSNVKVSSEASEDGILEANHVSTLACLGSPSTATVTIFDDDHAGIFTFEEPVTHVSESIGIMEVKVLRTSGARGNVIVPYKTIEGTARGGGEDFEDTCGELEFQNDEIVKIITIRIFDREEYEKECSFSLVLEEPKWIRRGMKGGFTITDEYDDKQPLTSKEEEERRIAEMGRPILGEHTKLEVIIEESYEFKSTVDKLIKKTNLALVVGTNSWREQFIEAITVSAGEDDDDDECGEEKLPSCFDYVMHFLTVFWKVLFAFVPPTEYWNGWACFIVSILMIGLLTAFIGDLASHFGCTIGLKDSVTAVVFVALGTSVPDTFASKVAATQDQYADASIGNVTGSNAVNVFLGIGVAWSIAAIYHAANGEQFKVSPGTLAFSVTLFTIFAFINVGVLLYRRRPEIGGELGGPRTAKLLTSCLFVLLWLLYIFFSSLEAYCHIKGF

SEQ ID NO: 12447 - protein, 937 aa, Homo Sapiens; identical to SEQ ID NO: 12446

SEQ ID NO: 12448 - protein, 965 aa, Homo Sapiens
MYNMRRLSLSPTFSMGFHLLVTVSLLFSHVDHVIAETEMEGEGNETGECTGSYYCKKGVILPIWEPQDPSFGDKIARATVYFVAMVYMFLGVSIIADRFMSSIEVITSQEKEITIKKPNGETTKTTVRIWNETVSNLTLMALGSSAPEILLSVIEVCGHNFTAGDLGPSTIVGSAAFNMFIIIALCVYVVPDGETRKIKHLRVFFVTAAWSIFAYTWLYIILSVISPGVVEVWEGLLTFFFFPICVVFAWVADRRLLFYKYVYKRYRAGKQRGMIIEHEGDRPSSKTEIEMDGKVVNSHVENFLDGALVLEVDERDQDDEEARREMARILKELKQKHPDKEIEQLIELANYQVLSQQQKSRAFYRIQATRLMTGAGNILKRHAADQARKAVSMHEVNTEVTENDPVSKIFFEQGTYQCLENCGTVALTIIRRGGDLTNTVFVDFRTEDGTANAGSDYEFTEGTVVFKPGDTQKEIRVGIIDDDIFEEDENFLVHLSNVKVSSEASEDGILEANHVSTLACLGSPSTATVTIFDDDHAGIFTFEEPVTHVSESIGIMEVKVLRTSGARGNVIVPYKTIEGTARGGGEDFEDTCGELEFQNDEIVKIITIRIFDREEYEKECSFSLVLEEPKWIRRGMKGGFTITGKYLFGQPVFRKVHAREHPILSTVITIADEYDDKQPLTSKEEEERRIAEMGRPILGEHTKLEVIIEESYEFKSTVDKLIKKTNLALVVGTNSWREQFIEAITVSAGEDDDDDECGEEKLPSCFDYVMHFLTVFWKVLFAFVPPTEYWNGWACFIVSILMIGLLTAFIGDLASHFGCTIGLKDSVTAVVFVALGTSVPDTFASKVAATQDQYADASIGNVTGSNAVNVFLGIGVAWSIAAIYHAANGEQFKVSPGTLAFSVTLFTIFAFINVGVLLYRRRPEIGGELGGPRTAKLLTSCLFVLLWLLYIFFSSLEAYCHIKGF

SEQ ID NO: 12449 - protein, 973 aa, Homo Sapiens; identical to SEQ ID NO: 12444

SEQ ID NO: 12450 - protein, 937 aa, Homo Sapiens; identical to SEQ ID NO: 12446

SEQ ID NO: 12451 - protein, 937 aa, Homo Sapiens; identical to SEQ ID NO: 12446

SEQ ID NO: 12452 - protein, 99 aa, Homo Sapiens
MAFSACFGGIIFNILVGVGLGCLLQISRSHTEVKLEPDGLLVWVLAGALGLSLVFSLVSVPLQCFQLSRVYGFCLLLFYLNFLVVALLTEFGVIHLKSM

SEQ ID NO: 12453 - protein, 103 aa, Homo Sapiens
MAGRRLNLRWALSVLCVLLMAETVSGTRGSSTGAHISPQFPASGVNQTPVVDCRKVCGLNVSDRCDFIRTNPDCHSDGGYLDYLEGIFCHFPPSLLPLAVTLY

SEQ ID NO: 12454 - protein, 131 aa, Homo Sapiens
MAGRRLNLRWALSVLCVLLMAETVSGTRGSSTGAHISPQFPASGVNQTPVVDCRKVCGLNVSDRCDFIRTNPDCHSDGGYLDYLEGIFCHFPPSLLPLAVTLYVSWLLYLFLILGVTAAKFFCPNLSAIST

SEQ ID NO: 12455 - protein, 231 aa, Homo Sapiens
MAGRRLNLRWALSVLCVLLMAETVSGTRGSSTGAHISPQFPASGVNQTPVVDCRKVCGLNVSDRCDFIRTNPDCHSDGGYLDYLEGIFCHFPPSLLPLAVTLYVSWLLYLFLILGVTAAKFFCPNLSAISTTLKLSHNVAGVTFLAFGNGAPDIFSALVAFSDPHTAGLALGALFGAGVLVTTVVAGGITILHPFMAASRPFFRDIVFYMVAVFLTFLMLFRGRVTLAWAL

SEQ ID NO: 12456 - protein, 584 aa, Homo Sapiens
MAGRRLNLRWALSVLCVLLMAETVSGTRGSSTGAHISPQFPASGVNQTPVVDCRKVCGLNVSDRCDFIRTNPDCHSDGGYLDYLEGIFCHFPPSLLPLAVTLYVSWLLYLFLILGVTAAKFFCPNLSAISTTLKLSHNVAGVTFLAFGNGAPDIFSALVAFSDPHTAGLALGALFGAGVLVTTVVAGGITILHPFMAASRPFFRDIVFYMVAVFLTFLMLFRGRVTLAWALGYLGLYVFYVVTVILCTWIYQRQRRGSLFCPMPVTPEILSDSEEDRVSSNTNSYDYGDEYRPLFFYQETTAQILVRALNPLDYMKWRRKSAYWKALKVFKLPVEFLLLLTVPVVDPDKDDQNWKRPLNCLHLVISPLVVVLTLQSGTYGVYEIGGLVPVWVVVVIAGTALASVTFFATSDSQPPRLHWLFAFLGFLTSALWINAAATEVVNILRSLGVVFRLSNTVLGLTLLAWGNSIGDAFSDFTLARQGYPRMAFSACFGGIIFNILVGVGLGCLLQISRSHTEVKLEPDGLLVWVLAGALGLSLVFSLVSVPLQCFQLSRVYGFCLLLFYLNFLVVALLTEFGVIHLKSM

SEQ ID NO: 12457 - protein, 584 aa, Homo Sapiens; identical to SEQ ID NO: 12456

SEQ ID NO: 12458 - protein, 528 aa, Homo Sapiens
MAGRRLNLRWALSVLCVLLMAETVSGTRGSSTGAHISPQFPASGVNQTPVVDCRKVCGLNVSDRCDFIRTNPDCHSDGGYLDYLEGIFCHFPPSLLPLAVTLYVSWLLYLFLILGVTAAKFFCPNLSAISTTLKLSHNVAGVTFLAFGNGAPDIFSALVAFSDPHTAGLALGALFGYLGLYVFYVVTVILCTWIYQRQRRGSLFCPMPVTPEILSDSEEDRVSSNTNSYDYGDEYRPLFFYQETTAQILVRALNPLDYMKWRRKSAYWKALKVFKLPVEFLLLLTVPVVDPDKDDQNWKRPLNCLHLVISPLVVVLTLQSGTYGVYEIGGLVPVWVVVVIAGTALASVTFFATSDSQPPRLHWLFAFLGFLTSALWINAAATEVVNILRSLGVVFRLSNTVLGLTLLAWGNSIGDAFSDFTLARQGYPRMAFSACFGGIIFNILVGVGLGCLLQISRSHTEVKLEPDGLLVWVLAGALGLSLVFSLVSVPLQCFQLSRVYGFCLLLFYLNFLVVALLTEFGVIHLKSM

SEQ ID NO: 12459 - protein, 53 aa, Homo Sapiens
MAGRRLNLRWALSVLCVLLMAETVSGTRGSSTGAHISPQFPASVPQGVWPECL

SEQ ID NO: 12460 - protein, 53 aa, Homo Sapiens; identical to SEQ ID NO: 12459

SEQ ID NO: 12461 - protein, 143 aa, Homo Sapiens
MTVGENEGVDDQGGWGKRLTTAGPSCSCADAFSDFTLARQGYPRMAFSACFGGIIFNILVGVGLGCLLQISRSHTEVKLEPDGLLVWVLAGALGLSLVFSLVSVPLQCFQLSRVYGFCLLLFYLNFLVVALLTEFGVIHLKSM

SEQ ID NO: 12462 - protein, 404 aa, Homo Sapiens
  misc_feature (1)..(1): Xaa can be any naturally occurring amino acid
XTLKLSHNVAGVTFLAFGNGAPDIFSALVAFSDPHTAGLALGALFGAGVLVTTVVAGGITILHPFMAASRPFFRDIVFYMVAVFLTFLMLFRGRVTLAWALGYLGLYVFYVVTVILCTWIYQRQRRGSLFCPMPVTPEILSDSEEDRVSSNTNSYDYGDEYRPLFFYQETTAQILVRALNPLDYMKWRRKSAYWKALKVFKLPVEFLLLLTVPVVDPDKDDQNWKRPLNCLHLVISPLVVVLTLQSGTYGVYEIGGLVPVWVVVVIAGTALASVTFFATSDSQPPRLHWLFAFLGFLTSALWINAAATEVVNILRSLGVVFRLSNTVLGLTLLAWGNSIGDAFSDFTLARQGYPRMAFSACFGGIIFNILVGVGLGCLLQISRSHTEVKTRRMQVAGKTKRHGA

SEQ ID NO: 12463 - protein, 701 aa, Homo Sapiens
MARRGWRRAPLRRGVGSSPRARRLMRPLWLLLAVGVFDWAGASDGGGGEARAMDEEIVSEKQAEESHRQDSANLLIFILLLTLTILTIWLFKHRRARFLHETGLAMIYGLLVGLVLRYGIHVPSDVNNVTLSCEVQSSPTTLLVNVSGKFYEYMLKGEISSHELNNVQDNEMLRKVTFDPEVFFNILLPPIIFYAGYSLKRRHFFRNLGSILAYAFLGTAISCFVIGSIMYGCVTLMKVTGQLAGDFYFTDCLLFGAIVSATDPVTVLAIFHELQVDVELYALLFGESVLNDAVAIVLSSSIVAYQPAGDNSHTFDVTAMFKSIGIFLGIFSGSFAMGAATGVVTALVTKFTKLREFQLLETGLFFLMSWSTFLLAEAWGFTGVVAVLFCGITQAHYTYNNLSTESQHRTKQLFELLNFLAENFIFSYMGLTLFTFQNHVFNPTFVVGAFVAIFLGRAANIYPLSLLLNLGRRSKIGSNFQHMMMFAGLRGAMAFALAIRDTATYARQMMFSTTLLIVFFTVWVFGGGTTAMLSCLHIRVGVDSDQEHLGVPENERRTTKAESAWLFRMWYNFDHNYLKPLLTHSGPPLTTTLPACCGPIARCLTSPQAYENQEQLKDDDSDLILNDGDISLTYGDSTVNTEPATSSAPRRFMGNSSEDALDRELAFGDHELVIRGTRLVLPMDDSEPPLNLLDNTRHGPA

SEQ ID NO: 12464 - protein, 669 aa, Homo Sapiens
MARRGWRRAPLRRGVGSSPRARRLMRPLWLLLAVGVFDWAGASDGGGGEARAMDEEIVSEKQAEESHRQDSANLLIFILLLTLTILTIWLFKHRRARFLHETGLAMIYGLLVGLVLRYGIHVPSDVNNVTLSCEVQSSPTTLLVTFDPEVFFNILLPPIIFYAGYSLKRRHFFRNLGSILAYAFLGTAISCFVIGSIMYGCVTLMKVTGQLAGDFYFTDCLLFGAIVSATDPVTVLAIFHELQVDVELYALLFGESVLNDAVAIVLSSSIVAYQPAGDNSHTFDVTAMFKSIGIFLGIFSGSFAMGAATGVVTALVTKFTKLREFQLLETGLFFLMSWSTFLLAEAWGFTGVVAVLFCGITQAHYTYNNLSTESQHRTKQLFELLNFLAENFIFSYMGLTLFTFQNHVFNPTFVVGAFVAIFLGRAANIYPLSLLLNLGRRSKIGSNFQHMMMFAGLRGAMAFALAIRDTATYARQMMFSTTLLIVFFTVWVFGGGTTAMLSCLHIRVGVDSDQEHLGVPENERRTTKAESAWLFRMWYNFDHNYLKPLLTHSGPPLTTTLPACCGPIARCLTSPQAYENQEQLKDDDSDLILNDGDISLTYGDSTVNTEPATSSAPRRFMGNSSEDALDRELAFGDHELVIRGTRLVLPMDDSEPPLNLLDNTRHGPA

SEQ ID NO: 12465 - protein, 184 aa, Homo Sapiens
MDEEIVSEKQAEESHRQDSANLLIFILLLTLTILTIWLFKHRRARFLHETGLAMIYGLLVGLVLRYGIHVPSDVNNVTLSCEVQSSPTTLLVNVSGKFYEYMLKGEISSHELNNVQDNEMLRKVTFDPEVFFNILLPPIIFYAGYSLKRRHFFRNLGSILAYAFLGTAISCFVIGSIMYGCVTL

SEQ ID NO: 12466 - protein, 649 aa, Homo Sapiens
MDEEIVSEKQAEESHRQDSANLLIFILLLTLTILTIWLFKHRRARFLHETGLAMIYGLLVGLVLRYGIHVPSDVNNVTLSCEVQSSPTTLLVNVSGKFYEYMLKGEISSHELNNVQDNEMLRKVTFDPEVFFNILLPPIIFYAGYSLKRRHFFRNLGSILAYAFLGTAISCFVIGSIMYGCVTLMKVTGQLAGDFYFTDCLLFGAIVSATDPVTVLAIFHELQVDVELYALLFGESVLNDAVAIVLSSSIVAYQPAGDNSHTFDVTAMFKSIGIFLGIFSGSFAMGAATGVVTALVTKFTKLREFQLLETGLFFLMSWSTFLLAEAWGFTGVVAVLFCGITQAHYTYNNLSTESQHRTKQLFELLNFLAENFIFSYMGLTLFTFQNHVFNPTFVVGAFVAIFLGRAANIYPLSLLLNLGRRSKIGSNFQHMMMFAGLRGAMAFALAIRDTATYARQMMFSTTLLIVFFTVWVFGGGTTAMLSCLHIRVGVDSDQEHLGVPENERRTTKAESAWLFRMWYNFDHNYLKPLLTHSGPPLTTTLPACCGPIARCLTSPQAYENQEQLKDDDSDLILNDGDISLTYGDSTVNTEPATSSAPRRFMGNSSEDALDRELAFGDHELVIRGTRLVLPMDDSEPPLNLLDNTRHGPA

SEQ ID NO: 12467 - protein, 649 aa, Homo Sapiens; identical to SEQ ID NO: 12466

SEQ ID NO: 12468 - protein, 649 aa, Homo Sapiens; identical to SEQ ID NO: 12466

SEQ ID NO: 12469 - protein, 679 aa, Homo Sapiens
MDEEIVSEKQAEESHRQDSANLLIFILLLTLTILTIWLFKHRRARFLHETGLAMIYGLLVGLVLRYGIHVPSDVNNVTLSCEVQSSPTTLLVNVSGKFYEYMLKGEISSHELNNVQDNEMLRKVTFDPEVFFNILLPPIIFYAGYSLKRRHFFRNLGSILAYAFLGTAISCFVIGSIMYGCVTLMKVTGQLAGDFYFTDCLLFGAIVSATDPVTVLAIFHELQVDVELYALLFGESVLNDAVAIVLSSSIVAYQPAGDNSHTFDVTAMFKSIGIFLGIFSGSFAMGAATGVVTALVTKFTKLREFQLLETGLFFLMSWSTFLLAEAWGFTGVVAVLFCGITQAHYTYNNLSTESQHRTKQLFELLNFLAENFIFSYMGLTLFTFQNHVFNPTFVVGAFVAIFLGRAANIYPLSLLLNLGRRSKIGSNFQHMMMFAGLRGAMAFALAIRDTATYARQMMFSTTLLIVFFTVWVFGGGTTAMLSCLHIRYCARLWGYRDELRHGLYPQGTHSLFGETDRVGVDSDQEHLGVPENERRTTKAESAWLFRMWYNFDHNYLKPLLTHSGPPLTTTLPACCGPIARCLTSPQAYENQEQLKDDDSDLILNDGDISLTYGDSTVNTEPATSSAPRRFMGNSSEDALDRELAFGDHELVIRGTRLVLPMDDSEPPLNLLDNTRHGPA

SEQ ID NO: 12470 - protein, 649 aa, Homo Sapiens; identical to SEQ ID NO: 12466

SEQ ID NO: 12471 - protein, 649 aa, Homo Sapiens; identical to SEQ ID NO: 12466

SEQ ID NO: 12472 - protein, 617 aa, Homo Sapiens
MDEEIVSEKQAEESHRQDSANLLIFILLLTLTILTIWLFKHRRARFLHETGLAMIYGLLVGLVLRYGIHVPSDVNNVTLSCEVQSSPTTLLVTFDPEVFFNILLPPIIFYAGYSLKRRHFFRNLGSILAYAFLGTAISCFVIGSIMYGCVTLMKVTGQLAGDFYFTDCLLFGAIVSATDPVTVLAIFHELQVDVELYALLFGESVLNDAVAIVLSSSIVAYQPAGDNSHTFDVTAMFKSIGIFLGIFSGSFAMGAATGVVTALVTKFTKLREFQLLETGLFFLMSWSTFLLAEAWGFTGVVAVLFCGITQAHYTYNNLSTESQHRTKQLFELLNFLAENFIFSYMGLTLFTFQNHVFNPTFVVGAFVAIFLGRAANIYPLSLLLNLGRRSKIGSNFQHMMMFAGLRGAMAFALAIRDTATYARQMMFSTTLLIVFFTVWVFGGGTTAMLSCLHIRVGVDSDQEHLGVPENERRTTKAESAWLFRMWYNFDHNYLKPLLTHSGPPLTTTLPACCGPIARCLTSPQAYENQEQLKDDDSDLILNDGDISLTYGDSTVNTEPATSSAPRRFMGNSSEDALDRELAFGDHELVIRGTRLVLPMDDSEPPLNLLDNTRHGPA

SEQ ID NO: 12473 - protein, 170 aa, Homo Sapiens
MLSCLHIRVGVDSDQEHLGVPENERRTTKAESAWLFRMWYNFDHNYLKPLLTHSGPPLTTTLPACCGPIARCLTSPQAYENQEQLKDDDSDLILNDGDISLTYGDSTVNTEPATSSAPRRFMGNSSEDALDRELAFGDHELVIRGTRLVLPMDDSEPPLNLLDNTRHGPA

SEQ ID NO: 12474 - protein, 33 aa, Homo Sapiens
  misc_feature (1)..(1): Xaa can be any naturally occurring amino acid
XAMLSCLHIRVGVDSDQEHLKGPQLFLNHRSYL

SEQ ID NO: 12475 - protein, 32 aa, Homo Sapiens
MENGTQILRPTQDPSECTKEVKSLMWVYVLVG

SEQ ID NO: 12476 - protein, 538 aa, Homo Sapiens
MENGTQILRPTQDPSECTKEVKSLMWVYVLVGNIVRGMGETPILPLGISYIEDFAKFENSPLYIGLVETGAIIGPLIGLLLASFCANVYVDTGFVNTDDLIITPTDTRWVGAWWFGFLICAGVNVLTAIPFFFLPNTLPKEGLETNADIIKNENEDKQKEEVKKEKYGITKDFLPFMKSLSCNPIYMLFILVSVIQFNAFVNMISFMPKYLEQQYGISSSDAIFLMGIYNLPPICIGYIIGGLIMKKFKITVKQAAHIGCWLSLLEYLLYFLSFLMTCENSSVVGINTSYEGIPQDLYVENDIFADCNVDCNCPSKIWDPVCGNNGLSYLSACLAGCETSIGTGINMVFQNCSCIQTSGNSSAVLGLCDKGPDCSLMLQYFLILSAMSSFIYSLAAIPGYMVLLRCMKSEEKSLGVGLHTFCTRVFAGIPAPIYFGALMDSTCLHWGTLKCGESGACRIYDSTTFRYIYLGLPAALRGSSFVPALIILILLRKCHLPGENASSGTELIETKVKGKENECKDIYQKSTVLKDDELKTKL

SEQ ID NO: 12477 - protein, 93 aa, Homo Sapiens
MFLTKNCKQEQERVESAKMFLLAITCAFVSKTLSGSYMNSMLTQIERQFNIPTSLVGFINGSFEIDMNMNLQFQFQATCPQTVSCVWKMEPRF

SEQ ID NO: 12478 - protein, 71 aa, Homo Sapiens
MFLTKNCKQEQERVESAKMFLLAITCAFVSKTLSGSYMNSMLTQIERQFNIPTSLVGFINGSFEIGNLLLI

SEQ ID NO: 12479 - skipped

SEQ ID NO: 12480 - protein, 13 aa, Homo Sapiens
MGETEKRIETHRI

SEQ ID NO: 12481 - protein, 51 aa, Homo Sapiens
MGETEKRIETHRIRCLSKLKMFLLAITCAFVSKTLSGSYMNSMLTQIERQF

SEQ ID NO: 12482 - protein, 95 aa, Homo Sapiens
MGETEKRIETHRIRCLSKLKMFLLAITCAFVSKTLSGSYMNSMLTQIERQFNIPTSLVGFINGSFEIDMNMNLQFQFQATCPQTVSCVWKMEPRF

SEQ ID NO: 12483 - protein, 88 aa, Homo Sapiens
MGETEKRIETHRIRCLSKLKMFLLAITCAFVSKTLSGSYMNSMLTQIERQFNIPTSLVGFINGSFEIGNLLLIIFVSYFGTKLHRPIM

SEQ ID NO: 12484 - protein, 91 aa, Homo Sapiens
MGETEKRIETHRIRCLSKLKMFLLAITCAFVSKTLSGSYMNSMLTQIERQFNIPTSLVGFINGSFEIGNLLLIIFVSYFGTKLHRPIMIGI

SEQ ID NO: 12485 - protein, 99 aa, Homo Sapiens
MGETEKRIETHRIRCLSKLKMFLLAITCAFVSKTLSGSYMNSMLTQIERQFNIPTSLVGFINGSFEIGNLLLIIFVSYFGTKLHRPIMIGIGCVVMGLG

SEQ ID NO: 12486 - protein, 137 aa, Homo Sapiens
MGETEKRIETHRIRCLSKLKMFLLAITCAFVSKTLSGSYMNSMLTQIERQFNIPTSLVGFINGSFEIGNLLLIIFVSYFGTKLHRPIMIGIGCVVMGLGCFLKSLPHFLMNQYEYESTVSVSGNLSSNSFLCMENGT

SEQ ID NO: 12487 - protein, 147 aa, Homo Sapiens
MGETEKRIETHRIRCLSKLKMFLLAITCAFVSKTLSGSYMNSMLTQIERQFNIPTSLVGFINGSFEIGNLLLIIFVSYFGTKLHRPIMIGIGCVVMGLGCFLKSLPHFLMNQYEYESTVSVSGNLSSNSFLCMENGTQILRPTQDPS

SEQ ID NO: 12488 - protein, 670 aa, Homo Sapiens
MGETEKRIETHRIRCLSKLKMFLLAITCAFVSKTLSGSYMNSMLTQIERQFNIPTSLVGFINGSFEIGNLLLIIFVSYFGTKLHRPIMIGIGCVVMGLGCFLKSLPHFLMNQYEYESTVSVSGNLSSNSFLCMENGTQILRPTQDPSECTKEVKSLMWVYVLVGNIVRGMGETPILPLGISYIEDFAKFENSPLYIGLVETGAIIGPLIGLLLASFCANVYVDTGFVNTDDLIITPTDTRWVGAWWFGFLICAGVNVLTAIPFFFLPNTLPKEGLETNADIIKNENEDKQKEEVKKEKYGITKDFLPFMKSLSCNPIYMLFILVSVIQFNAFVNMISFMPKYLEQQYGISSSDAIFLMGIYNLPPICIGYIIGGLIMKKFKITVKQAAHIGCWLSLLEYLLYFLSFLMTCENSSVVGINTSYEGIPQDLYVENDIFADCNVDCNCPSKIWDPVCGNNGLSYLSACLAGCETSIGTGINMVFQNCSCIQTSGNSSAVLGLCDKGPDCSLMLQYFLILSAMSSFIYSLAAIPGYMVLLRCMKSEEKSLGVGLHTFCTRVFAGIPAPIYFGALMDSTCLHWGTLKCGESGACRIYDSTTFRYIYLGLPAALRGSSFVPALIILILLRKCHLPGENASSGTELIETKVKGKENECKDIYQKSTVLKDDELKTKL

SEQ ID NO: 12489 - protein, 782 aa, Homo Sapiens [sequence omitted]

SEQ ID NO: 12490 - protein, 1534 aa, Homo Sapiens
MALTPGWGSSAGPVRPELWLLLWAAAWRLGASACPALCTCTGTTVDCHGTGLQAIPKNIPRNTERLELNGNNITRIHKNDFAGLKQLRVLQLMENQIGAVERGAFDDMKELERLRLNRNQLHMLPELLFQNNQALSRLDLSENAIQAIPRKAFRGATDLKNLQLDKNQISCIEEGAFRALRGLEVLTLNNNNITTIPVSSFNHMPKLRTFRLHSNHLFCDCHLAWLSQWLRQRPTIGLFTQCSGPASLRGLNVAEVQKSEFSCSGQGEAGRVPTCTLSSGSCPAMCTCSNGIVDCRGKGLTAIPANLPETMTEIRLELNGIKSIPPGAFSPYRKLRRIDLSNNQIAEIAPDAFQGLRSLNSLVLYGNKITDLPRGVFGGLYTLQLLLLNANKINCIRPDAFQDLQNLSLLSLYDNKIQSLAKGTFTSLRAIQTLHLAQNPFICDCNLKWLADFLRTNPIETSGARCASPRRLANKRIGQIKSKKFRCSAKEQYFIPGTEDYQLNSECNSDVVCPHKCRCEANVVECSSLKLTKIPERIPQSTAELRLNNNEISILEATGMFKKLTHLKKINLSNNKVSEIEDGAFEGAASVSELHLTANQLESIRSGMFRGLDGLRTLMLRNNRISCIHNDSFTGLRNVRLLSLYDNQITTVSPGAFDTLQSLSTLNLLANPFNCNCQLAWLGGWLRKRKIVTGNPRCQNPDFLRQIPLQDVAFPDFRCEEGQEEGGCLPRPQCPQECACLDTVVRCSNKHLRALPKGIPKNVTELYLDGNQFTLVPGQLSTFKYLQLVDLSNNKISSLSNSSFTNMSQLTTLILSYNALQCIPPLAFQGLRSLRLLSLHGNDISTLQEGIFADVTSLSHLAIGANPLYCDCHLRWLSSWVKTGYKEPGIARCAGPQDMEGKLLLTTPAKKFECQGPPTLAVQAKCDLCLSSPCQNQGTCHNDPLEVYRCACPSGYKGRDCEVSLDSCSSGPCENGGTCHAQEGEDAPFTCSCPTGFEGPTCGVNTDDCVDHACANGGVCVDGVGNYTCQCPLQYEGKACEQLVDLCSPDLNPCQHEAQCVGTPDGPRCECMPGYAGDNCSENQDDCRDHRCQNGAQCMDEVNSYSCLCAEGYSGQLCEIPPHLPAPKSPCEGTECQNGANCVDQGNRPVCQCLPGFGGPECEKLLSVNFVDRDTYLQFTDLQNWPRANITLQVSTAEDNGILLYNGDNDHIAVELYQGHVRVSYDPGSYPSSAIYSAETINDGQFHTVELVAFDQMVNLSIDGGSPMTMDNFGKHYTLNSEAPLYVGGMPVDVNSAAFRLWQILNGTGFHGCIRNLYINNELQDFTKTQMKPGVVPGCEPCRKLYCLHGICQPNATPGPMCHCEAGWVGLHCDQPADGPCHGHKCVHGQCVPLDALSYSCQCQDGYSGALCNQAGALAEPCRGLQCLHGHCQASGTKGAHCVCDPGFSGELCEQESECRGDPVRDFHQVQRGYAICQTTRPLSWVECRGSCPGQGCCQGLRLKRRKFTFECSDGTSFAEEVEKPTKCGCALCA

SEQ ID NO: 12491 - protein, 1461 aa, Homo Sapiens
MALTPGWGSSAGPVRPELWLLLWAAAWRLGASACPALCTCTGTTVDCHGTGLQAIPKNIPRNTERLELNGNNITRIHKNDFAGLKQLRVLQLMENQIGAVERGAFDDMKELERLRLNRNQLHMLPELLFQNNQALSRLDLSENAIQAIPRKAFRGATDLKNLQLDKNQISCIEEGAFRALRGLEVLTLNNNNITTIPVSSFNHMPKLRTFRLHSNHLFCDCHLAWLSQWLRQRPTIGLFTQCSGPASLRGLNVAEVQKSEFSCSGQGEAGRVPTCTLSSGSCPAMCTCSNGIVDCRGKGLTAIPANLPETMTEIRLELNGIKSIPPGAFSPYRKLRRIDLSNNQIAEIAPDAFQGLRSLNSLVLYGNKITDLPRGVFGGLYTLQLLLLNANKINCIRPDAFQDLQNLSLLSLYDNKIQSLAKGTFTSLRAIQTLHLAQNPFICDCNLKWLADFLRTNPIETSGARCASPRRLANKRIGQIKSKKFRCSAKEQYFIPGTEDYQLNSECNSDVVCPHKCRCEANVVECSSLKLTKIPERIPQSTAELRLNNNEISILEATGMFKKLTHLKKINLSNNKVSEIEDGAFEGAASVSELHLTANQLESIRSGMFRGLDGLRTLMLRNNRISCIHNDSFTGLRNVRLLSLYDNQITTVSPGAFDTLQSLSTLNLLANPFNCNCQLAWLGGWLRKRKIVTGNPRCQNPDFLRQIPLQDVAFPDFRCEEGQEEGGCLPRPQCPQECACLDTVVRCSNKHLRALPKGIPKNVTELYLDGNQFTLVPGQLSTFKYLQLVDLSNNKISSLSNSSFTNMSQLTTLILSYNALQCIPPLAFQGLRSLRLLSLHGNDISTLQEGIFADVTSLSHLAIGANPLYCDCHLRWLSSWVKTGYKEPGIARCAGPQDMEGKLLLTTPAKKFECQGPPTLAVQAKCDLCLSSPCQNQGTCHNDPLEVYRCACPSGYKGRDCEVSLDSCSSGPCENGGTCHAQEGEDAPFTCSCPTGFEGPTCGVNTDDCVDHACANGGVCVDGVGNYTCQCPLQYEGKACEQLVDLCSPDLNPCQHEAQCVGTPDGPRCECMPGYAGDNCSENQDDCRDHRCQNGAQCMDEVNSYSCLCAEGYSGQLCEIPPHLPAPKSPCEGTECQNGANCVDQGNRPVCQCLPGFGGPECEKLLSVNFVDRDTYLQFTDLQNWPRANITLQVSTAEDNGILLYNGDNDHIAVELYQGHVRVSYDPGSYPSSAIYSAETINDGQFHTVELVAFDQMVNLSIDGGSPMTMDNFGKHYTLNSEAPLYVGGMPVDVNSAAFRLWQILNGTGFHGCIRNLYINNELQDFTKTQMKPGVVPGCEPCRKLYCLHGICQPNATPGPMCHCEAGWVGLHCDQPADGPCHGHKCVHGQCVPLDALSYSCQCQDGYSGALCNQSPSAGGTLSGTFTRSRGAMPSARPRAPCHGWSAGARAQARAAARAFG

SEQ ID NO: 12492 - protein, 409 aa, Homo Sapiens
MALTPGWGSSAGPVRPELWLLLWAAAWRLGASACPALCTCTGTTVDCHGTGLQAIPKNIPRNTERLELNGNNITRIHKNDFAGLKQLRVLQLMENQIGAVERGAFDDMKELERLRLNRNQLHMLPELLFQNNQALSRLDLSENAIQAIPRKAFRGATDLKNLQLDKNQISCIEEGAFRALRGLEVLTLNNNNITTIPVSSFNHMPKLRTFRLHSNHLFCDCHLAWLSQWLRQRPTIGLFTQCSGPASLRGLNVAEVQKSEFSCSGQGEAGRVPTCTLSSGSCPAMCTCSNGIVDCRGKGLTAIPANLPETMTEIRLELNGIKSIPPGAFSPYRKLRRIDLSNNQIAEIAPDAFQGLRSLNSLHTGPVTCPHTTGTHSSHCRAFAVAVPHSRNDLEAMFEEEVPRIFYSA

SEQ ID NO: 12493 - protein, 146 aa, Homo Sapiens
MEAVLFVNAEAAAPRQSGRPRDLNGNNITRITKTDFAGLRHLRVLQLMENKISTIERGAFQDLKELERLRLNRNHLQLFPELLFLGTAKLYRLDLSENQIQAIPRKAFRGAVDIKNLQLDYNQISCIEDGAFRALRDLEVLTLNNN

SEQ ID NO: 12494 - protein, 1439 aa, Homo Sapiens
MENKISTIERGAFQDLKELERLRLNRNHLQLFPELLFLGTAKLYRLDLSENQIQAIPRKAFRGAVDIKNLQLDYNQISCIEDGAFRALRDLEVLTLNNNNITRLSVASFNHMPKLRTFRLHSNNLYCDCHLAWLSDWLRQRPRVGLYTQCMGPSHLRGHNVAEVQKREFVCSARHGGHQSFMAPSCSVLHCPAACTCSNNIVDCRGKGLTEIPTNLPETITEIRLEQNTIKVIPPGAFSPYKKLRRIDLSNNQISELAPDAFQGLRSLNSLVLYGNKITELPKSLFEGLFSLQLLLLNANKINCLRVDAFQDLHNLNLLSLYDNKLQTIAKGTFSPLRAIQTMHLAQNPFICDCHLKWLADYLHTNPIETSGARCTSPRRLANKRIGQIKSKKFRCSGTEDYRSKLSGDCFADLACPEKCRCEGTTVDCSNQKLNKIPEHIPQYTAELRLNNNEFTVLEATGIFKKLPQLRKINFSNNKITDIEEGAFEGASGVNEILLTSNRLENVQHKMFKGLESLKTLMLRSNRITCVGNDSFIGLSSVRLLSLYDNQITTVAPGAFDTLHSLSTLNLLANPFNCNCYLAWLGEWLRKKRIVTGNPRCQKPYFLKEIPIQDVAIQDFTCDDGNDDNSCSPLSRCPTECTCLDTVVRCSNKGLKVLPKGIPRDVTELYLDGNQFTLVPKELSNYKHLTLIDLSNNRISTLSNQSFSNMTQLLTLILSYNRLRCIPPRTFDGLKSLRLLSLHGNDISVVPEGAFNDLSALSHLAIGANPLYCDCNMQWLSDWVKSEYKEPGIARCAGPGEMADKLLLTTPSKKFTCQGPVDVNILAKCNPCLSNPCKNDGTCNSDPVDFYRCTCPYGFKGQDCDVPIHACISNPCKHGGTCHLKEGEEDGFWCICADGFEGENCEVNVDDCEDNDCENNSTCVDGINNYTCLCPPEYTGELCEEKLDFCAQDLNPCQHDSKCILTPKGFKCDCTPGYVGEHCDIDFDDCQDNKCKNGAHCTDAVNGYTCICPEGYSGLFCEFSPPMVLPRTSPCDNFDCQNGAQCIVRINEPICQCLPGYQGEKCEKLVSVNFINKESYLQIPSAKVRPQTNITLQIATDEDSGILLYKGDKDHIAVELYRGRVRASYDTGSHPASAIYSVETINDGNFHIVELLALDQSLSLSVDGGNPKIITNLSKQSTLNFDSPLYVGGMPGKSNVASLRQAPGQNGTSFHGCIRNLYINSELQDFQKVPMQTGILPGCEPCHKKVCAHGTCQPSSQAGFTCECQEGWMGPLCDQRTNDPCLGNKCVHGTCLPINAFSYSCKCLEGHGGVLCDEEEDLFNPCQAIKCKHGKCRLSGLGQPYCECSSGYTGDSCDREISCRGERIRDYYQKQQGYAACQTTKKVSRLECRGGCAGGQCCGPLRSKRRKYSFECTDGSSFVDEVEKVVKCGCTRCVS

SEQ ID NO: 12495 - protein, 1542 aa, Homo Sapiens
MRGVGWQMLSLSLGLVLAILNKVAPQACPAQCSCSGSTVDCHGLALRSVPRNIPRNTERLDLNGNNITRITKTDFAGLRHLRVLQLMENKISTIERGAFQDLKELERLRLNRNHLQLFPELLFLGTAKLYRLDLSENQIQAIPRKAFRGAVDIKNLQLDYNQISCIEDGAFRALRDLEVLTLNNNNITRLSVASFNHMPKLRTFRLHSNNLYCDCHLAWLSDWLRQRPRVGLYTQCMGPSHLRGHNVAEVQKREFVCSDEEEGHQSFMAPSCSVLHCPAACTCSNNIVDCRGKGLTEIPTNLPETITEIRLEQNTIKVIPPGAFSPYKKLRRIDLSNNQISELAPDAFQGLRSLNSLVLYGNKITELPKSLFEGLFSLQLLLLNANKINCLRVDAFQDLHNLNLLSLYDNKLQTIAKGTFSPLRAIQTMHLAQNPFICDCHLKWLADYLHTNPIETSGARCTSPRRLANKRIGQIKSKKFRCSAKEQYFIPGTEDYRSKLSGDCFADLACPEKCRCEGTTVDCSNQKLNKIPEHIPQYTAELRLNNNEFTVLEATGIFKKLPQLRKINFSNNKITDIEEGAFEGASGVNEILLTSNRLENVQHKMFKGLESLKTLMLRSNRITCVGNDSFIGLSSVRLLSLYDNQITTVAPGAFDTLHSLSTLNLLANPFNCNCYLAWLGEWLRKKRIVTGNPRCQKPYFLKEIPIQDVAIQDFTCDDGNDDNSCSPLSRCPTECTCLDTVVRCSNKGLKVLPKGIPRDVTELYLDGNQFTLVPKELSNYKHLTLIDLSNNRISTLSNQSFSNMTQLLTLILSYNRLRCIPPRTFDGLKSLRLLSLHGNDISVVPEGAFNDLSALSHLAIGANPLYCDCNMQWLSDWVKSEYKEPGIARCAGPGEMADKLLLTTPSKKFTCQGPVDVNILAKCNPCLSNPCKNDGTCNSDPVDFYRCTCPYGFKGQDCDVPIHACISNPCKHGGTCHLKEGEEDGFWCICADGFEGENCEVNVDDCEDNDCENNSTCVDGINNYTCLCPPEYTAANLNEVEKGELCEEKLDFCAQDLNPCQHDSKCILTPKGFKCDCTPGYVGEHCDIDFDDCQDNKCKNGAHCTDAVNGYTCICPEGYSGLFCEFSPPMVLPRTSPCDNFDCQNGAQCIVRINEPICQCLPGYQGEKCEKLVSVNFINKESYLQIPSAKVRPQTNITLQIATDEDSGILLYKGDKDHIAVELYRGRVRASYDTGSHPASAIYSVETINDGNFHIVELLALDQSLSLSVDGGNPKIITNLSKQSTLNFDSPLYVGGMPGKSNVASLRQAPGQNGTSFHGCIRNLYINSELQDFQKVPMQTGILPGCEPCHKKVCAHGTCQPSSQAGFTCECQEGWMGPLCDQRTNDPCLGNKCVHGTCLPINAFSYSCKCLEGHGGVLCDEEEDLFNPCQAIKCKHGKCRLSGLGQPYCECSSGYTGDSCDREISCRGERIRDYYQKQQGYAACQTTKKVSRLECRGGCAGGQCCGPLRSKRRKYSFECTDGSSFVDEVEKVVKCGCTRCVS

SEQ ID NO: 12496 - protein, 1529 aa, Homo Sapiens
MRGVGWQMLSLSLGLVLAILNKVAPQACPAQCSCSGSTVDCHGLALRSVPRNIPRNTERLDLNGNNITRITKTDFAGLRHLRVLQLMENKISTIERGAFQDLKELERLRLNRNHLQLFPELLFLGTAKLYRLDLSENQIQAIPRKAFRGAVDIKNLQLDYNQISCIEDGAFRALRDLEVLTLNNNNITRLSVASFNHMPKLRTFRLHSNNLYCDCHLAWLSDWLRQRPRVGLYTQCMGPSHLRGHNVAEVQKREFVCSGHQSFMAPSCSVLHCPAACTCSNNIVDCRGKGLTEIPTNLPETITEIRLEQNTIKVIPPGAFSPYKKLRRIDLSNNQISELAPDAFQGLRSLNSLVLYGNKITELPKSLFEGLFSLQLLLLNANKINCLRVDAFQDLHNLNLLSLYDNKLQTIAKGTFSPLRAIQTMHLAQNPFICDCHLKWLADYLHTNPIETSGARCTSPRRLANKRIGQIKSKKFRCSAKEQYFIPGTEDYRSKLSGDCFADLACPEKCRCEGTTVDCSNQKLNKIPEHIPQYTAELRLNNNEFTVLEATGIFKKLPQLRKINFSNNKITDIEEGAFEGASGVNEILLTSNRLENVQHKMFKGLESLKTLMLRSNRITCVGNDSFIGLSSVRLLSLYDNQITTVAPGAFDTLHSLSTLNLLANPFNCNCYLAWLGEWLRKKRIVTGNPRCQKPYFLKEIPIQDVAIQDFTCDDGNDDNSCSPLSRCPTECTCLDTVVRCSNKGLKVLPKGIPRDVTELYLDGNQFTLVPKELSNYKHLTLIDLSNNRISTLSNQSFSNMTQLLTLILSYNRLRCIPPRTFDGLKSLRLLSLHGNDISVVPEGAFNDLSALSHLAIGANPLYCDCNMQWLSDWVKSEYKEPGIARCAGPGEMADKLLLTTPSKKFTCQGPVDVNILAKCNPCLSNPCKNDGTCNSDPVDFYRCTCPYGFKGQDCDVPIHACISNPCKHGGTCHLKEGEEDGFWCICADGFEGENCEVNVDDCEDNDCENNSTCVDGINNYTCLCPPEYTGELCEEKLDFCAQDLNPCQHDSKCILTPKGFKCDCTPGYVGEHCDIDFDDCQDNKCKNGAHCTDAVNGYTCICPEGYSGLFCEFSPPMVLPRTSPCDNFDCQNGAQCIVRINEPICQCLPGYQGEKCEKLVSVNFINKESYLQIPSAKVRPQTNITLQIATDEDSGILLYKGDKDHIAVELYRGRVRASYDTGSHPASAIYSVETINDGNFHIVELLALDQSLSLSVDGGNPKIITNLSKQSTLNFDSPLYVGGMPGKSNVASLRQAPGQNGTSFHGCIRNLYINSELQDFQKVPMQTGILPGCEPCHKKVCAHGTCQPSSQAGFTCECQEGWMGPLCDQRTNDPCLGNKCVHGTCLPINAFSYSCKCLEGHGGVLCDEEEDLFNPCQAIKCKHGKCRLSGLGQPYCECSSGYTGDSCDREISCRGERIRDYYQKQQGYAACQTTKKVSRLECRGGCAGGQCCGPLRSKRRKYSFECTDGSSFVDEVEKVVKCGCTRCVS

SEQ ID NO: 12497 - protein, 1521 aa, Homo Sapiens
MRGVGWQMLSLSLGLVLAILNKVAPQACPAQCSCSGSTVDCHGLALRSVPRNIPRNTERLDLNGNNITRITKTDFAGLRHLRVLQLMENKISTIERGAFQDLKELERLRLNRNHLQLFPELLFLGTAKLYRLDLSENQIQAIPRKAFRGAVDIKNLQLDYNQISCIEDGAFRALRDLEVLTLNNNNITRLSVASFNHMPKLRTFRLHSNNLYCDCHLAWLSDWLRQRPRVGLYTQCMGPSHLRGHNVAEVQKREFVCSGHQSFMAPSCSVLHCPAACTCSNNIVDCRGKGLTEIPTNLPETITEIRLEQNTIKVIPPGAFSPYKKLRRIDLSNNQISELAPDAFQGLRSLNSLVLYGNKITELPKSLFEGLFSLQLLLLNANKINCLRVDAFQDLHNLNLLSLYDNKLQTIAKGTFSPLRAIQTMHLAQNPFICDCHLKWLADYLHTNPIETSGARCTSPRRLANKRIGQIKSKKFRCSGTEDYRSKLSGDCFADLACPEKCRCEGTTVDCSNQKLNKIPEHIPQYTAELRLNNNEFTVLEATGIFKKLPQLRKINFSNNKITDIEEGAFEGASGVNEILLTSNRLENVQHKMFKGLESLKTLMLRSNRITCVGNDSFIGLSSVRLLSLYDNQITTVAPGAFDTLHSLSTLNLLANPFNCNCYLAWLGEWLRKKRIVTGNPRCQKPYFLKEIPIQDVAIQDFTCDDGNDDNSCSPLSRCPTECTCLDTVVRCSNKGLKVLPKGIPRDVTELYLDGNQFTLVPKELSNYKHLTLIDLSNNRISTLSNQSFSNMTQLLTLILSYNRLRCIPPRTFDGLKSLRLLSLHGNDISVVPEGAFNDLSALSHLAIGANPLYCDCNMQWLSDWVKSEYKEPGIARCAGPGEMADKLLLTTPSKKFTCQGPVDVNILAKCNPCLSNPCKNDGTCNSDPVDFYRCTCPYGFKGQDCDVPIHACISNPCKHGGTCHLKEGEEDGFWCICADGFEGENCEVNVDDCEDNDCENNSTCVDGINNYTCLCPPEYTGELCEEKLDFCAQDLNPCQHDSKCILTPKGFKCDCTPGYVGEHCDIDFDDCQDNKCKNGAHCTDAVNGYTCICPEGYSGLFCEFSPPMVLPRTSPCDNFDCQNGAQCIVRINEPICQCLPGYQGEKCEKLVSVNFINKESYLQIPSAKVRPQTNITLQIATDEDSGILLYKGDKDHIAVELYRGRVRASYDTGSHPASAIYSVETINDGNFHIVELLALDQSLSLSVDGGNPKIITNLSKQSTLNFDSPLYVGGMPGKSNVASLRQAPGQNGTSFHGCIRNLYINSELQDFQKVPMQTGILPGCEPCHKKVCAHGTCQPSSQAGFTCECQEGWMGPLCDQRTNDPCLGNKCVHGTCLPINAFSYSCKCLEGHGGVLCDEEEDLFNPCQAIKCKHGKCRLSGLGQPYCECSSGYTGDSCDREISCRGERIRDYYQKQQGYAACQTTKKVSRLECRGGCAGGQCCGPLRSKRRKYSFECTDGSSFVDEVEKVVKCGCTRCVS

SEQ ID NO: 12498 - protein, 1525 aa, Homo Sapiens
MRGVGWQMLSLSLGLVLAILNKVAPQACPAQCSCSGSTVDCHGLALRSVPRNIPRNTERLDLNGNNITRITKTDFAGLRHLRVLQLMENKISTIERGAFQDLKELERLRLNRNHLQLFPELLFLGTAKLYRLDLSENQIQAIPRKAFRGAVDIKNLQLDYNQISCIEDGAFRALRDLEVLTLNNNNITRLSVASFNHMPKLRTFRLHSNNLYCDCHLAWLSDWLRQRPRVGLYTQCMGPSHLRGHNVAEVQKREFVCSDEEEGHQSFMAPSCSVLHCPAACTCSNNIVDCRGKGLTEIPTNLPETITEIRLEQNTIKVIPPGAFSPYKKLRRIDLSNNQISELAPDAFQGLRSLNSLVLYGNKITELPKSLFEGLFSLQLLLLNANKINCLRVDAFQDLHNLNLLSLYDNKLQTIAKGTFSPLRAIQTMHLAQNPFICDCHLKWLADYLHTNPIETSGARCTSPRRLANKRIGQIKSKKFRCSGTEDYRSKLSGDCFADLACPEKCRCEGTTVDCSNQKLNKIPEHIPQYTAELRLNNNEFTVLEATGIFKKLPQLRKINFSNNKITDIEEGAFEGASGVNEILLTSNRLENVQHKMFKGLESLKTLMLRSNRITCVGNDSFIGLSSVRLLSLYDNQITTVAPGAFDTLHSLSTLNLLANPFNCNCYLAWLGEWLRKKRIVTGNPRCQKPYFLKEIPIQDVAIQDFTCDDGNDDNSCSPLSRCPTECTCLDTVVRCSNKGLKVLPKGIPRDVTELYLDGNQFTLVPKELSNYKHLTLIDLSNNRISTLSNQSFSNMTQLLTLILSYNRLRCIPPRTFDGLKSLRLLSLHGNDISVVPEGAFNDLSALSHLAIGANPLYCDCNMQWLSDWVKSEYKEPGIARCAGPGEMADKLLLTTPSKKFTCQGPVDVNILAKCNPCLSNPCKNDGTCNSDPVDFYRCTCPYGFKGQDCDVPIHACISNPCKHGGTCHLKEGEEDGFWCICADGFEGENCEVNVDDCEDNDCENNSTCVDGINNYTCLCPPEYTGELCEEKLDFCAQDLNPCQHDSKCILTPKGFKCDCTPGYVGEHCDIDFDDCQDNKCKNGAHCTDAVNGYTCICPEGYSGLFCEFSPPMVLPRTSPCDNFDCQNGAQCIVRINEPICQCLPGYQGEKCEKLVSVNFINKESYLQIPSAKVRPQTNITLQIATDEDSGILLYKGDKDHIAVELYRGRVRASYDTGSHPASAIYSVETINDGNFHIVELLALDQSLSLSVDGGNPKIITNLSKQSTLNFDSPLYVGGMPGKSNVASLRQAPGQNGTSFHGCIRNLYINSELQDFQKVPMQTGILPGCEPCHKKVCAHGTCQPSSQAGFTCECQEGWMGPLCDQRTNDPCLGNKCVHGTCLPINAFSYSCKCLEGHGGVLCDEEEDLFNPCQAIKCKHGKCRLSGLGQPYCECSSGYTGDSCDREISCRGERIRDYYQKQQGYAACQTTKKVSRLECRGGCAGGQCCGPLRSKRRKYSFECTDGSSFVDEVEKVVKCGCTRCVS

SEQ ID NO: 12499 - protein, 212 aa, Homo Sapiens
MTQLLTLILSYNRLRCIPPRTFDGLKSLRLLSLHGNDISVVPEGAFNDLSALSHLAIGANPLYCDCNMQWLSDWVKSEYKEPGIARCAGPGEMADKLLLTTPSKKFTCQGLPGPCGFLIPGPVDVNILAKCNPCLSNPCKNDGTCNSDPVDFYRCTCPYGFKGQDCDVPIHACISNPCKHGGTCHLKEGEEDGFWCICADGFEGENCEVNVD

SEQ ID NO: 12500 - protein, 196 aa, Homo Sapiens
  misc_feature (1)..(1): Xaa can be any naturally occurring amino acid
XSDWVKSEYKEPGIARCAGPGEMADKLLLTTPSKKFTCQGPVDVNILAKCNPCLSNPCKNDGTCNSDPVDFYRCTCPYGFKGQDCDVPIHACISNPCKHGGTCHLKEGEEDGFWCICADGFEGENCEVNVDDCEDNDCENNSTCVDGINNYTCLCPPEYTGTNNRKYFAFHQYICLKASLELCYICLVNLFLFDKW

SEQ ID NO: 12501 - protein, 82 aa, Homo Sapiens
  misc_feature (1)..(1): Xaa can be any naturally occurring amino acid
XSYDTGSHPASAIYSVETINDGNFHIVELLALDQSLSLSVDGGNPKIITNLSKQSTLNFDSPLYVGGMPGKSNVASLRQGAL

SEQ ID NO: 12502 - protein, 1530 aa, Homo Sapiens
MAPGWAGVGAAVRARLALALALASVLSGPPAVACPTKCTCSAASVDCHGLGLRAVPRGIPRNAERLDLDRNNITRITKMDFAGLKNLRVLHLEDNQVSVIERGAFQDLKQLERLRLNKNKLQVLPELLFQSTPKLTRLDLSENQIQGIPRKAFRGITDVKNLQLDNNHISCIEDGAFRALRDLEILTLNNNNISRILVTSFNHMPKIRTLRLHSNHLYCDCHLAWLSDWLRQRRTVGQFTLCMAPVHLRGFNVADVQKKEYVCPAPHSEPPSCNANSISCPSPCTCSNNIVDCRGKGLMEIPANLPEGIVEIRLEQNSIKAIPAGAFTQYKKLKRIDISKNQISDIAPDAFQGLKSLTSLVLYGNKITEIVKGLFDGLVSLQLLLLNANKINCLRVNTFQDLQNLNLLSLYDNKLQTISKGLFAPLQSIQTLHLAQNPFVCDCHLKWLADYLQDNPIETSGARCSSPRRLANKRISQIKSKKFRCSGSEDYRSRFSSECFMDLVCPEKCRCEGTIVDCSNQKLVRIPSHLPEYVTDLRLNDNEVSVLEATGIFKKLPNLRKINLSNNKIKEVREGAFDGAASVQELMLTGNQLETVHGRVFRGLSGLKTLMLRSNLIGCVSNDTFAGLSSVRLLSLYDNRITTITPGAFTTLVSLSTINLLSNPFNCNCHLAWLGKWLRKRRIVSGNPRCQKPFFLKEIPIQDVAIQDFTCDGNEESSCQLSPRCPEQCTCMETVVRCSNKGLRALPRGMPKDVTELYLEGNHLTAVPRELSALRHLTLIDLSNNSISMLTNYTFSNMSHLSTLILSYNRLRCIPVHAFNGLRSLRVLTLHGNDISSVPEGSFNDLTSLSHLALGTNPLHCDCSLRWLSEWVKAGYKEPGIARCSSPEPMADRLLLTTPTHRFQCKVLWFCCPGPVDINIVAKCNACLSSPCKNNGTCTQDPVELYRCACPYSYKGKDCTVPINTCIQNPCQHGGTCHLSDSHKDGFSCSCPLGFEGQRCEINPDDCEDNDCENNATCVDGINNYVCICPPNYTGELCDEVIDHCVPELNLCQHEAKCIPLDKGFSCECVPGYSGKLCETDNDDCVAHKCRHGAQCVDTINGYTCTCPQGFSGPFCEHPPPMVLLQTSPCDQYECQNGAQCIVVQQEPTCRCPPGFAGPRCEKLITVNFVGKDSYVELASAKVRPQANISLQVATDKDNGILLYKGDNDPLALELYQGHVRLVYDSLSSPPTTVYSVETVNDGQFHSVELVTLNQTLNLVVDKGTPKSLGKLQKQPAVGINSPLYLGGIPTSTGLSALRQGTDRPLGGFHGCIHEVRINNELQDFKALPPQSLGVSPGCKSCTVCKHGLCRSVEKDSVVCECRPGWTGPLCDQEARDPCLGHRCHHGKCVATGTSYMCKCAEGYGGDLCDNKNDSANACSAFKCHHGQCHISDQGEPYCLCQPGFSGEHCQQENPCLGQVVREVIRRQKGYASCATASKVPIMECRGGCGPQCCQPTRSKRRKYVFQCTDGSSFVEEVERHLECGCLACS

SEQ ID NO: 12503 - protein, 1523 aa, Homo Sapiens
MAPGWAGVGAAVRARLALALALASVLSGPPAVACPTKCTCSAASVDCHGLGLRAVPRGIPRNAERLDLDRNNITRITKMDFAGLKNLRVLHLEDNQVSVIERGAFQDLKQLERLRLNKNKLQVLPELLFQSTPKLTRLDLSENQIQGIPRKAFRGITDVKNLQLDNNHISCIEDGAFRALRDLEILTLNNNNISRILVTSFNHMPKIRTLRLHSNHLYCDCHLAWLSDWLRQRRTVGQFTLCMAPVHLRGFNVADVQKKEYVCPAPHSEPPSCNANSISCPSPCTCSNNIVDCRGKGLMEIPANLPEGIVEIRLEQNSIKAIPAGAFTQYKKLKRIDISKNQISDIAPDAFQGLKSLTSLVLYGNKITEIVKGLFDGLVSLQLLLLNANKINCLRVNTFQDLQNLNLLSLYDNKLQTISKGLFAPLQSIQTLHLAQNPFVCDCHLKWLADYLQDNPIETSGARCSSPRRLANKRISQIKSKKFRCSGSEDYRSRFSSECFMDLVCPEKCRCEGTIVDCSNQKLVRIPSHLPEYVTDLRLNDNEVSVLEATGIFKKLPNLRKINLSNNKIKEVREGAFDGAASVQELMLTGNQLETVHGRVFRGLSGLKTLMLRSNLIGCVSNDTFAGLSSVRLLSLYDNRITTITPGAFTTLVSLSTINLLSNPFNCNCHLAWLGKWLRKRRIVSGNPRCQKPFFLKEIPIQDVAIQDFTCDGNEESSCQLSPRCPEQCTCMETVVRCSNKGLRALPRGMPKDVTELYLEGNHLTAVPRELSALRHLTLIDLSNNSISMLTNYTFSNMSHLSTLILSYNRLRCIPVHAFNGLRSLRVLTLHGNDISSVPEGSFNDLTSLSHLALGTNPLHCDCSLRWLSEWVKAGYKEPGIARCSSPEPMADRLLLTTPTHRFQCKGPVDINIVAKCNACLSSPCKNNGTCTQDPVELYRCACPYSYKGKDCTVPINTCIQNPCQHGGTCHLSDSHKDGFSCSCPLGFEGQRCEINPDDCEDNDCENNATCVDGINNYVCICPPNYTGELCDEVIDHCVPELNLCQHEAKCIPLDKGFSCECVPGYSGKLCETDNDDCVAHKCRHGAQCVDTINGYTCTCPQGFSGPFCEHPPPMVLLQTSPCDQYECQNGAQCIVVQQEPTCRCPPGFAGPRCEKLITVNFVGKDSYVELASAKVRPQANISLQVATDKDNGILLYKGDNDPLALELYQGHVRLVYDSLSSPPTTVYSVETVNDGQFHSVELVTLNQTLNLVVDKGTPKSLGKLQKQPAVGINSPLYLGGIPTSTGLSALRQGTDRPLGGFHGCIHEVRINNELQDFKALPPQSLGVSPGCKSCTVCKHGLCRSVEKDSVVCECRPGWTGPLCDQEARDPCLGHRCHHGKCVATGTSYMCKCAEGYGGDLCDNKNDSANACSAFKCHHGQCHISDQGEPYCLCQPGFSGEHCQQENPCLGQVVREVIRRQKGYASCATASKVPIMECRGGCGPQCCQPTRSKRRKYVFQCTDGSSFVEEVERHLECGCLACS

SEQ ID NO: 12504 - protein, 1393 aa, Homo Sapiens
RDLSENQIQGIPRKAFRGITDVKNLQLDNNHISCIEDGAFRALRDLEILTLNNNNISRILVTSFNHMPKIRTLRLHSNHLYCDCHLAWLSDWLRQRRTVGQFTLCMAPVHLRGFNVADVQKKEYVCPAPHSEPPSCNANSISCPSPCTCSNNIVDCRGKGLMEIPANLPEGIVEIRLEQNSIKAIPAGAFTQYKKLKRIDISKNQISDIAPDAFQGLKSLTSLVLYGNKITEIVKGLFDGLVSLQLLLLNANKINCLRVNTFQDLQNLNLLSLYDNKLQTISKGLFAPLQSIQTLHLAQNPFVCDCHLKWLADYLQDNPIETSGARCSSPRRLANKRISQIKSKKFRCSGSEDYRSRFSSECFMDLVCPEKCRCEGTIVDCSNQKLVRIPSHLPEYVTDLRLNDNEVSVLEATGIFKKLPNLRKINLSNNKIKEVREGAFDGAASVQELMLTGNQLETVHGRVFRGLSGLKTLMLRSNLIGCVSNDTFAGLSSVRLLSLYDNRITTITPGAFTTLVSLSTINLLSNPFNCNCHLAWLGKWLRKRRIVSGNPRCQKPFFLKEIPIQDVAIQDFTCDGNEESSCQLSPRCPEQCTCMETVVRCSNKGLRALPRGMPKDVTELYLEGNHLTAVPRELSALRHLTLIDLSNNSISMLTNYTFSNMSHLSTLILSYNRLRCIPVHAFNGLRSLRVLTLHGNDISSVPEGSFNDLTSLSHLALGTNPLHCDCSLRWLSEWVKAGYKEPGIARCSSPEPMADRLLLTTPTHRFQCKVLWFCCPGPVDINIVAKCNACLSSPCKNNGTCTQDPVELYRCACPYSYKGKDCTVPINTCIQNPCQHGGTCHLSDSHKDGFSCSCPLGFEGQRCEINPDDCEDNDCENNATCVDGINNYVCICPPNYTGELCDEVIDHCVPELNLCQHEAKCIPLDKGFSCECVPGYSGKLCETDNDDCVAHKCRHGAQCVDTINGYTCTCPQGFSGPFCEHPPPMVLLQTSPCDQYECQNGAQCIVVQQEPTCRCPPGFAGPRCEKLITVNFVGKDSYVELASAKVRPQANISLQVATDKDNGILLYKGDNDPLALELYQGHVRLVYDSLSSPPTTVYSVETVNDGQFHSVELVTLNQTLNLVVDKGTPKSLGKLQKQPAVGINSPLYLGGIPTSTGLSALRQGTDRPLGGFHGCIHEVRINNELQDFKALPPQSLGVSPGCKSCTVCKHGLCRSVEKDSVVCECRPGWTGPLCDQEARDPCLGHRCHHGKCVATGTSYMCKCAEGYGGDLCDNKNDSANACSAFKCHHGQCHISDQGEPYCLCQPGFSGEHCQQENPCLGQVVREVIRRQKGYASCATASKVPIMECRGGCGPQCCQPTRSKRRKYVFQCTDGSSFVEEVERHLECGCLACS

SEQ ID NO: 12505 - protein, 163 aa, Homo Sapiens
MKPSIAEMLHRGRMLWIILLSTIALGWTTPIPLIEDSEEIDEPCFDPCYCEVKESLFHIHCDSKGFTNISQITEFWSRPFKLYLQRNSMRKLYTNSFLHLNNAVSINLGNNALQDIQTGAFNGLKILKRLYLHENKLDVFRNDTFLGLESLEYLQADYNVIKR

SEQ ID NO: 12506 - protein, 977 aa, Homo Sapiens
MKPSIAEMLHRGRMLWIILLSTIALGWTTPIPLIEDSEEIDEPCFDPCYCEVKESLFHIHCDSKGFTNISQITEFWSRPFKLYLQRNSMRKLYTNSFLHLNNAVSINLGNNALQDIQTGAFNGLKILKRLYLHENKLDVFRNDTFLGLESLEYLQADYNVIKRIESGAFRNLSKLRVLILNDNLIPMLPTNLFKAVSLTHLDLRGNRLKVLFYRGMLDHIGRSLMELQLEENPWNCTCEIVQLKSWLERIPYTALVGDITCETPFHFHGKDLREIRKTELCPLLSDSEVEASLGIPHSSSSKENAWPTKPSSMLSSVHFTASSVEYKSSNKQPKPTKQPRTPRPPSTSQALYPGPNQPPIAPYQTRPPIPIICPTGCTCNLHINDLGLTVNCKERGFNNISELLPRPLNAKKLYLSSNLIQKIYRSDFWNFSSLDLLHLGNNRISYVQDGAFINLPNLKSLFLNGNDIEKLTPGMFRGLQSLHYLYFEFNVIREIQPAAFSLMPNLKLLFLNNNLLRTLPTDAFAGTSLARLNLRKNYFLYLPVAGVLEHLNAIVQIDLNENPWDCTCDLVPFKQWIETISSVSVVGDVLCRSPENLTHRDVRTIELEVLCPEMLHVAPAGESPAQPGDSHLIGAPTSASPYEFSPPGGPVPLSVLILSLLVLFFSAVFVAAGLFAYVLRRRRKKLPFRSKRQEGVDLTGIQMQCHRLFEDGGGGGGGSGGGGRPTLSSPEKAPPVGHVYEYIPHPVTQMCNNPIYKPREEEEVAVSSAQEAGSAERGGPGTQPPGMGEALLGSEQFAETPKENHSNYRTLLEKEKEWALAVSSSQLNTIVTVNHHHPHHPAVGGVSGVVGGTGGDLAGFRHHEKNGGVVLFPPGGGCGSGSMLLDRERPQPAPCTVGFVDCLYGTVPKLKELHVHPPGMQYPDLQQDARLKETLLFSAGKGFTDHQTQKSDYLELRAKLQTKPDYLEVLEKTTYRF

SEQ ID NO: 12507 - protein, 977 aa, Homo Sapiens; identical to SEQ ID NO: 12506

SEQ ID NO: 12508 - protein, 132 aa, Homo Sapiens
MKSSGLFPFLVLLALGTLAPWAVEGSGKSFKAGVCPPKKSAQCLRYKKPECQSDWQCPGKKRCCPDTCGIKCLDPVDTPNPTRRKPGKCPVTYGQCLMLNPPNFCEMDGQCKRDLKCCMGMCGKSCVSPVKA

SEQ ID NO: 12509 - protein, 600 aa, Homo Sapiens
GKVLSAKVVTNARSPGAKCYGIVTMSSSTEVSRCIAHLHRTELHGQLISVEKVKGDPSKKEMKKENDEKSSSRSSGDKKNTSDRSSKTQASVKKEEKRSSEKSEKKESKDTKKIEGSKSPGHMVILDQTKGDHCRPSRRGRYEKIHGRSKEKERASLDKKRDKDYRRKEILPFEKMKEQRLREHLVRFERLRRAMELRRRREIAERERRERERIRIIREREERERLQRERERLEIERQKLERERMERERLERERIRIEQERRKEAERIAREREELRRQQQQLRYEQEKRNSLKRPRDVDHRRDDPYWSENKKLSLDTDARFGHGSDYSRQQNRFNDFDHRERGRFPESSAVQSSSFERRDRFVGQSEGKKARPTARREDPSFERYPKNFSDSRRNEPPPPRNELRESDRREVRGERDERRTVIIHDRPDITHPRHPREAGPNPSRPTSWKSEGSMSTDKRETRVERPERSGREVSGHSVRGAPPGNRSSASGYGSREGDRGVITDRGGGSQHYPEERHVVERHGRDTSGPRKEWHGPPSQGPSYHDTRRMGDGRAGAGMITQHSSNASPINRIVQISGNSMPRGSGSGFKPFKGGPPRRF

SEQ ID NO: 12510 - protein, 100 aa, Homo Sapiens
GVITDRGGGSQHYPEERHVVERHGRDTSGPRKEWHGPPSQGPSYHDTRRMGDGRAGAGMITQHSSNASPINRIVQISGNSMPRGSGSGFKPFKGGPPRRF

SEQ ID NO: 12511 - protein, 89 aa, Homo Sapiens
MAAATGAVAASAASGQAEGKKITDLRVIDLKSELKRRNLDITGVKTVLISRLKQAIEEEGGDPDNIELTVSTDTPNKKPTKGKDYKLKH

SEQ ID NO: 12512 - protein, 1034 aa, Homo Sapiens
MAAATGAVAASAASGQAEGKKITDLRVIDLKSELKRRNLDITGVKTVLISRLKQAIEEEGGDPDNIELTVSTDTPNKKPTKGKGKKHEADELSGDASVEDDAFIKDCELENQEAHEQDGNDELKDSEEFGENEEENVHSKELLSAEENKRAHELIEAEGIEDIEKEDIESQEIEAQEGEDDTFLTAQDGEEEENEKDIAGSGDGTQEVSKPLPSEGSLAEADHTAHEEMEAHTTVKEAEDDNISVTIQAEDAITLDFDGDDLLETGKNVKITDSEASKPKDGQDAIAQSPEKESKDYEMNANHKDGKKEDCVKGDPVEKEARESSKKAESGDKEKDTLKKGPSSTGASGQAKSSSKESKDSKTSSKDDKGSTSSTSGSSGSSTKNIWVSGLSSNTKAADLKNLFGKYGKVLSAKVVTNARSPGAKCYGIVTMSSSTEVSRCIAHLHRTELHGQLISVEKVKGDPSKKEMKKENDEKSSSRSSGDKKNTSDRSSKTQASVKKEEKRSSEKSEKKESKDTKKIEGKDEKNDNGASGQTSESIKKSEEKKRISSKSPGHMVILDQTKGDHCRPSRRGRYEKIHGRSKEKERASLDKKRDKDYRRKEILPFEKMKEQRLREHLVRFERLRRAMELRRRREIAERERRERERIRIIREREERERLQRERERLEIERQKLERERMERERLERERIRIEQERRKEAERIAREREELRRQQQQLRYEQEKRNSLKRPRDVDHRRDDPYWSENKKLSLDTDARFGHGSDYSRQQNRFNDFDHRERGRFPESSAVQSSSFERRDRFVGQSEGKKARPTARREDPSFERYPKNFSDSRRNEPPPPRNELRESDRREVRGERDERRTVIIHDRPDITHPRHPREAGPNPSRPTSWKSEGSMSTDKRETRVERPERSGREVSGHSVRGAPPGNRSSASGYGSREGDRGVITDRGGGSQHYPEERHVVERHGRDTSGPRKEWHGPPSQGPSYHDTRRMGDGRAGAGMITQHSSNASPINRIVQISGNSMPRGSGSGFKPFKGGPPRRF

SEQ ID NO: 12513 - protein, 229 aa, Homo Sapiens
MAAATGAVAASAASGQAEGKKITDLRVIDLKSELKRRNLDITGVKTVLISRLKQAIEEEGGDPDNIELTVSTDTPNKKPTKGKGKKHEADELSGDASVEDDAFIKDCELENQEAHEQDGNDELKDSEEFGENEEENVHSKELLSAEENKRAHELIEAEGIEDIEKEDIESQEIEAQEGEDDTFLTAQDGEEEENEKDSEASKPKDGQDAIAQSPEKESKDYEMNANHKD

SEQ ID NO: 12514 - protein, 453 aa, Homo Sapiens
MAAATGAVAASAASGQAEGKKITDLRVIDLKSELKRRNLDITGVKTVLISRLKQAIEEEGGDPDNIELTVSTDTPNKKPTKGKGKKHEADELSGDASVEDDAFIKDCELENQEAHEQDGNDELKDSEEFGENEEENVHSKELLSAEENKRAHELIEAEGIEDIEKEDIESQEIEAQEGEDDTFLTAQDGEEEENEKEGSLAEADHTAHEEMEAHTTVKEAEDDNISVTIQAEDAITLDFDGDDLLETGKNVKITDSEASKPKDGQDAIAQSPEKESKDYEMNANHKDGKKEDCVKGDPVEKEARESSKKAESGDKEKDTLKKGPSSTGASGQAKSSSKESKDSKTSSKDDKGSTSSTSGSSGSSTKNIWVSGLSSNTKAADLKNLFGKYGKVLSAKVVTNARSPGAKCYGIVTMSSSTEVSRCIAHLHRTELHGQLISVEKVKGDPSKKEMKK

SEQ ID NO: 12515 - protein, 192 aa, Homo Sapiens
MAAATGAVAASAASGQAEGKKITDLRVIDLKSELKRRNLDITGVKTVLISRLKQAIEEEGGDPDNIELTVSTDTPNKKPTKGKGKKHEADELSGDASVEDDAFIKDGEEEENEKDIAGSGDGTQEVSKPLPSEGSLAEADHTAHEEMEAHTTVKEAEDDNISVTIQAEDAITLDFDGDDLLETGKNVKITDS

SEQ ID NO: 12516 - protein, 177 aa, Homo Sapiens
MAAATGAVAASAASGQAEGKKITDLRVIDLKSELKRRNLDITGVKTVLISRLKQAIEEEGGDPDNIELTVSTDTPNKKPTKGKGKKHEADELSGDASVEDDAFIKEIEAQEGEDDTFLTAQDGEEEENEKALQRNLKTARHHLKMTKEVQVVLVVAVEAQLKISGLVDFHLIPKLLI

SEQ ID NO: 12517 - protein, 161 aa, Homo Sapiens
MAAATGAVAASAASGQAEGKKITDLRVIDLKSELKRRNLDITGVKTVLISRLKQAIEEEGGDPDNIELTVSTDTPNKKPTKGKGKKHEADELSGDASVEDDAFIKEIEAQEGEDDTFLTAQDGEEEENEKEGSLAEADHTAHEEMEAHTTVKEAEDDNISV

SEQ ID NO: 12518 - protein, 62 aa, Homo Sapiens
MAAATGAVAASAASGQAEGKKITDLRVIDLKSELKRRNLDITGVKTVLISRLKQVKNMKQMS

SEQ ID NO: 12519 - protein, 62 aa, Homo Sapiens; identical to SEQ ID NO: 12518

SEQ ID NO: 12520 - protein, 62 aa, Homo Sapiens; identical to SEQ ID NO: 12518

SEQ ID NO: 12521 - protein, 205 aa, Homo Sapiens
  misc_feature (1)..(1): Xaa can be any naturally occurring amino acid
XDITGVKTVLISRLKQAIEEEGGDPDNIELTVSTDTPNKKPTKGKGKKHEADELSGDASVEDDAFIKDCELENQEAHEQDGNDELKDSEEFGENEEENVHSKELLSAEENKRAHELIEAEGIEDIEKEDIESQEIEAQEGEDDTFLTAQDGEEEENEKALQRNLKTARHHLKMTKEVQVVLVVAVEAQLKISGLVDFHLIPKLLI

SEQ ID NO: 12522 - protein, 112 aa, Homo Sapiens
  misc_feature (1)..(1): Xaa can be any naturally occurring amino acid
XLRYEQEKRNSLKRPRDVDHSKYFSSRRDDPYWSENKKLSLDTDARFGHGSDYSRQQNRFNDFDHRERGRFPESSAVQSSSFERRDRFVGQSEGKKARPTARREDPSFERYP

SEQ ID NO: 12523 - protein, 103 aa, Homo Sapiens
MASRWAVQLLLVAAWSMGCGEALKCYTCKEPMTSASCRTITRCKPEDTACMTTLVTVEAEYPFNQSPVVTRSCSSSCVATDPDSIGAAHLIFCCFRDLCNSEL

SEQ ID NO: 12524 - protein, 57 aa, Homo Sapiens
AAAQPPAAAVPGPSVPQPAPGQPSPVLQLQQKQSRISPIQKPQGLDPVEILQEREYR

SEQ ID NO: 12525 - protein, 37 aa, Homo Sapiens
AEGGESALGPDGECFVEGVRGKNHWPIDESSQMSDLP

SEQ ID NO: 12526 - protein, 68 aa, Homo Sapiens
MAIEDGNLEEMEEEVRLKKRKRRRNVDKDPAKEDVEKAKKRRGRPPAEKLSPNPPKLTKQMNAIIDTV

SEQ ID NO: 12527 - protein, 254 aa, Homo Sapiens
MEEEVRLKKRKRRRNVDKDPAKEDVEKAKKRRGRPPAEKLSPNPPKLTKQMNAIIDTVINYKDRCNVEKVPSNSQLEIEGNSSGRQLSEVFIQLPSRKELPEYYELIRKPVDFKKIKERIRNHKYRSLGDLEKDVMLLCHNAQTFNLEGSQIYEDSIVLQSVFKSARQKIAKEEESEDESNEEEEEEDEEESESEAKSVKVKIKLNKKDDKGRDKGKGKKRPNRGKAKPVVSDFDSDEEQDEREQSEGSGTDDE

SEQ ID NO: 12528 - protein, 254 aa, Homo Sapiens; identical to SEQ ID NO: 12527

SEQ ID NO: 12529 - protein, 149 aa, Homo Sapiens
MEEEVRLKKRKRRRNVDKDPAKEDVEKAKKRRGRPPAEKLSPNPPKLTKQMNAIIDTVINYKDSSGRQLSEVFIQLPSRKELPEYYELIRKPVDFKKIKERIRNHKYRSLGDLEKDVMLLCHNAQTFNLEGSQIYEDSIVLQSVFKSAR

SEQ ID NO: 12530 - protein, 169 aa, Homo Sapiens
MEEEVRLKKRKRRRNVDKDPAKEDVEKAKKRRGRPPAEKLSPNPPKLTKQMNAIIDTVINYKDSSGRQLSEVFIQLPSRKELPEYYELIRKPVDFKKIKERIRNHKYRSLGDLEKDVMLLCHNAQTFNLEGSQIYEDSIVLQSVFKSARQKIAKEEESEDESNEEEEEE

SEQ ID NO: 12531 - protein, 192 aa, Homo Sapiens
MEEEVRLKKRKRRRNVDKDPAKEDVEKAKKRRGRPPAEKLSPNPPKLTKQMNAIIDTVINYKDSSGRQLSEVFIQLPSRKELPEYYELIRKPVDFKKIKERIRNHKYRSLGDLEKDVMLLCHNAQTFNLEGSQIYEDSIVLQSVFKSARQKIAKEEESEDESNEEEEEEDEEESESEAKSVKVKIKLNKKDD

SEQ ID NO: 12532 - protein, 202 aa, Homo Sapiens
MEEEVRLKKRKRRRNVDKDPAKEDVEKAKKRRGRPPAEKLSPNPPKLTKQMNAIIDTVINYKDSSGRQLSEVFIQLPSRKELPEYYELIRKPVDFKKIKERIRNHKYRSLGDLEKDVMLLCHNAQTFNLEGSQIYEDSIVLQSVFKSARQKIAKEEESEDESNEEEEEEDEEESESEAKSVKVKIKLNKKDDKGRDKGKGKK

SEQ ID NO: 12533 - protein, 236 aa, Homo Sapiens
MEEEVRLKKRKRRRNVDKDPAKEDVEKAKKRRGRPPAEKLSPNPPKLTKQMNAIIDTVINYKDSSGRQLSEVFIQLPSRKELPEYYELIRKPVDFKKIKERIRNHKYRSLGDLEKDVMLLCHNAQTFNLEGSQIYEDSIVLQSVFKSARQKIAKEEESEDESNEEEEEEDEEESESEAKSVKVKIKLNKKDDKGRDKGKGKKRPNRGKAKPVVSDFDSDEEQDEREQSEGSGTDDE

SEQ ID NO: 12534 - protein, 260 aa, Homo Sapiens
MIINISHVWCCGEMKAIEDGNLEEMEEEVRLKKRKRRRNVDKDPAKEDVEKAKKRRGRPPAEKLSPNPPKLTKQMNAIIDTVINYKDSSGRQLSEVFIQLPSRKELPEYYELIRKPVDFKKIKERIRNHKYRSLGDLEKDVMLLCHNAQTFNLEGSQIYEDSIVLQSVFKSARQKIAKEEESEDESNEEEEEEDEEESESEAKSVKVKIKLNKKDDKGRDKGKGKKRPNRGKAKPVVSDFDSDEEQDEREQSEGSGTDDE

SEQ ID NO: 12535 - protein, 62 aa, Homo Sapiens
MKGTGMRPPHPGMGPPQSPMDQHSQGYMSPHPSPLGAPEHVSSPMSGGGPTPPQMPPSQPGA

SEQ ID NO: 12536 - protein, 244 aa, Homo Sapiens
MKRLAARCFAGLLILSPLTVISDSRPADSGKAIEDGNLEEMEEEVRLKKRKRRRNVDKDPAKEDVEKAKKRRGRPPAEKLSPNPPKLTKQMNAIIDTVINYKDRCNVEKVPSNSQLEIEGNSSGRQLSEVFIQLPSRKELPEYYELIRKPVDFKKIKERIRNHKYRSLGDLEKDVMLLCHNAQTFNLEGSQIYEDSIVLQSVFKSARQKIAKEEESEDESNEEEEEEDEEESESEAKSVKVKIK

SEQ ID NO: 12537 - protein, 245 aa, Homo Sapiens
MKRLAARCFAGLLILSPLTVISDSRPADSGKAIEDGNLEEMEEEVRLKKRKRRRNVDKDPAKEDVEKAKKRRGRPPAEKLSPNPPKLTKQMNAIIDTVINYKDRCNVEKVPSNSQLEIEGNSSGRQLSEVFIQLPSRKELPEYYELIRKPVDFKKIKERIRNHKYRSLGDLEKDVMLLCHNAQTFNLEGSQIYEDSIVLQSVFKSARQKIAKEEESEDESNEEEEEEDEEESESEAKSVKVKIKL

SEQ ID NO: 12538 - protein, 200 aa, Homo Sapiens
MKRLAARCFAGLLILSPLTVISDSRPADSGKAIEDGNLEEMEEEVRLKKRKRRRNVDKDPAKEDVEKAKKRRGRPPAEKLSPNPPKLTKQMNAIIDTVINYKDSSGRQLSEVFIQLPSRKELPEYYELIRKPVDFKKIKERIRNHKYRSLGDLEKDVMLLCHNAQTFNLEGSQIYEDSIVLQSVFKSARQKIAKEEESED

SEQ ID NO: 12539 - protein, 228 aa, Homo Sapiens
MKRLAARCFAGLLILSPLTVISDSRPADSGKAIEDGNLEEMEEEVRLKKRKRRRNVDKDPAKEDVEKAKKRRGRPPAEKLSPNPPKLTKQMNAIIDTVINYKDSSGRQLSEVFIQLPSRKELPEYYELIRKPVDFKKIKERIRNHKYRSLGDLEKDVMLLCHNAQTFNLEGSQIYEDSIVLQSVFKSARQKIAKEEESEDESNEEEEEEDEEESESEAKSVKVKIKLN

SEQ ID NO: 12540 - protein, 229 aa, Homo Sapiens
MKRLAARCFAGLLILSPLTVISDSRPADSGKAIEDGNLEEMEEEVRLKKRKRRRNVDKDPAKEDVEKAKKRRGRPPAEKLSPNPPKLTKQMNAIIDTVINYKDSSGRQLSEVFIQLPSRKELPEYYELIRKPVDFKKIKERIRNHKYRSLGDLEKDVMLLCHNAQTFNLEGSQIYEDSIVLQSVFKSARQKIAKEEESEDESNEEEEEEDEEESESEAKSVKVKIKLNK

SEQ ID NO: 12541 - protein, 276 aa, Homo Sapiens
MKRLAARCFAGLLILSPLTVISDSRPADSGKAIEDGNLEEMEEEVRLKKRKRRRNVDKDPAKEDVEKAKKRRGRPPAEKLSPNPPKLTKQMNAIIDTVINYKDSSGRQLSEVFIQLPSRKELPEYYELIRKPVDFKKIKERIRNHKYRSLGDLEKDVMLLCHNAQTFNLEGSQIYEDSIVLQSVFKSARQKIAKEEESEDESNEEEEEEDEEESESEAKSVKVKIKLNKKDDKGRDKGKGKKRPNRGKAKPVVSDFDSDEEQDEREQSEGSGTDDE

SEQ ID NO: 12542 - protein, 276 aa, Homo Sapiens; identical to SEQ ID NO: 12541

SEQ ID NO: 12543 - protein, 98 aa, Homo Sapiens
MKRLAARCFAGLLILSPLTVISDSRPADSGKCCWLWFKASVCRPSKTAIWRKWKRKYGLRSEKDEEMWIKILQKKMWKKLRREEAALPLRNCHQIPPN

SEQ ID NO: 12544 - protein, 98 aa, Homo Sapiens; identical to SEQ ID NO: 12543

SEQ ID NO: 12545 - protein, 98 aa, Homo Sapiens; identical to SEQ ID NO: 12543

SEQ ID NO: 12546 - protein, 232 aa, Homo Sapiens [sequence omitted]

SEQ ID NO: 12547 - protein, 278 aa, Homo Sapiens
MLMKRLAARCFAGLLILSPLTVISDSRPADSGKAIEDGNLEEMEEEVRLKKRKRRRNVDKDPAKEDVEKAKKRRGRPPAEKLSPNPPKLTKQMNAIIDTVINYKDSSGRQLSEVFIQLPSRKELPEYYELIRKPVDFKKIKERIRNHKYRSLGDLEKDVMLLCHNAQTFNLEGSQIYEDSIVLQSVFKSARQKIAKEEESEDESNEEEEEEDEEESESEAKSVKVKIKLNKKDDKGRDKGKGKKRPNRGKAKPVVSDFDSDEEQDEREQSEGSGTDDE

SEQ ID NO: 12548-12549 - skipped (2 entries)

SEQ ID NO: 12550 - protein, 5 aa, Homo Sapiens
MSTPT

SEQ ID NO: 12551 - protein, 7 aa, Homo Sapiens
MSTPTDP

SEQ ID NO: 12552 - protein, 9 aa, Homo Sapiens
MSTPTDPGA

SEQ ID NO: 12553 - protein, 193 aa, Homo Sapiens
MSTPTDPGAMPHPGPSPGPGPSPGPILGPSPGPGPSPGSVHSMMGPSPGPPSVSHPMPTMGSTDFPQEGMHQMHKPIDGIHDKGIVEDIHCGSMKGTGMRPPHPGMGPPQSPMDQHSQGYMSPHPSPLGAPEHVSSPMSGGGPTPPQMPPSQPGALIPGDPQAMSQPNRGPSPFSPVQLHQLRAQILAYKMLA

SEQ ID NO: 12554 - protein, 215 aa, Homo Sapiens
MSTPTDPGAMPHPGPSPGPGPSPGPILGPSPGPGPSPGSVHSMMGPSPGPPSVSHPMPTMGSTDFPQEGMHQMHKPIDGIHDKGIVEDIHCGSMKGTGMRPPHPGMGPPQSPMDQHSQGYMSPHPSPLGAPEHVSSPMSGGGPTPPQMPPSQPGALIPGDPQAMSQPNRGPSPFSPVQLHQLRAQILAYKMLARGQPLPETLQLAVQGKRTLPGL

SEQ ID NO: 12555 - protein, 1590 aa, Homo Sapiens
MSTPTDPGAMPHPGPSPGPGPSPGPILGPSPGPGPSPGSVHSMMGPSPGPPSVSHPMPTMGSTDFPQEGMHQMHKPIDGIHDKGIVEDIHCGSMKGTGMRPPHPGMGPPQSPMDQHSQGYMSPHPSPLGAPEHVSSPMSGGGPTPPQMPPSQPGALIPGDPQAMSQPNRGPSPFSPVQLHQLRAQILAYKMLARGQPLPETLQLAVQGKRTLPGLQQQQQQQQQQQQQQQQQQQQQQQPQQQPPQPQTQQQQQPALVNYNRPSGPGPELSGPSTPQKLPVPAPGGRPSPAPPAAAQPPAAAVPGPSVPQPAPGQPSPVLQLQQKQSRISPIQKPQGLDPVEILQEREYRLQARIAHRIQELENLPGSLPPDLRTKATVELKALRLLNFQRQLRQEVVACMRRDTTLETALNSKAYKRSKRQTLREARMTEKLEKQQKIEQERKRRQKHQEYLNSILQHAKDFKEYHRSVAGKIQKLSKAVATWHANTEREQKKETERIEKERMRRLMAEDEEGYRKLIDQKKDRRLAYLLQQTDEYVANLTNLVWEHKQAQAAKEKKKRRRRKKKAEENAEGGESALGPDGEPIDESSQMSDLPVKVTHTETGKVLFGPEAPKASQLDAWLEMNPGYEVAPRSDSEESDSDYEEEDEEEESSRQETEEKILLDPNSEEVSEKDAKQIIETAKQDVDDEYSMQYSARGSQSYYTVAHAISERVEKQSALLINGTLKHYQLQGLEWMVSLYNNNLNGILADEMGLGKTIQTIALITYLMEHKRLNGPYLIIVPLSTLSNWTYEFDKWAPSVVKISYKGTPAMRRSLVPQLRSGKFNVLLTTYEYIIKDKHILAKIRWKYMIVDEGHRMKNHHCKLTQVLNTHYVAPRRILLTGTPLQNKLPELWALLNFLLPTIFKSCSTFEQWFNAPFAMTGERVDLNEEETILIIRRLHKVLRPFLLRRLKKEVESQLPEKVEYVIKCDMSALQKILYRHMQAKGILLTDGSEKDKKGKGGAKTLMNTIMQLRKICNHPYMFQHIEESFAEHLGYSNGVINGAELYRASGKFELLDRILPKLRATNHRVLLFCQMTSLMTIMEDYFAFRNFLYLRLDGTTKSEDRAALLKKFNEPGSQYFIFLLSTRAGGLGLNLQAADTVVIFDSDWNPHQDLQAQDRAHRIGQQNEVRVLRLCTVNSVEEKILAAAKYKLNVDQKVIQAGMFDQKSSSHERRAFLQAILEHEEENEEEDEVPDDETLNQMIARREEEFDLFMRMDMDRRREDARNPKRKPRLMEEDELPSWIIKDDAEVERLTCEEEEEKIFGRGSRQRRDVDYSDALTEKQWLRAIEDGNLEEMEEEVRLKKRKRRRNVDKDPAKEDVEKAKKRRGRPPAEKLSPNPPKLTKQMNAIIDTVINYKDRCNVEKVPSNSQLEIEGNSSGRQLSEVFIQLPSRKELPEYYELIRKPVDFKKIKERIRNHKYRSLGDLEKDVMLLCHNAQTFNLEGSQIYEDSIVLQSVFKSARQKIAKEEESEDESNEEEEEEDEEESESEAKSVKVKIKLNKKDDKGRDKGKGKKRPNRGKAKPVVSDFDSDEEQDEREQSEGSGTDDE

SEQ ID NO: 12556 - protein, 1572 aa, Homo Sapiens
MSTPTDPGAMPHPGPSPGPGPSPGPILGPSPGPGPSPGSVHSMMGPSPGPPSVSHPMPTMGSTDFPQEGMHQMHKPIDGIHDKGIVEDIHCGSMKGTGMRPPHPGMGPPQSPMDQHSQGYMSPHPSPLGAPEHVSSPMSGGGPTPPQMPPSQPGALIPGDPQAMSQPNRGPSPFSPVQLHQLRAQILAYKMLARGQPLPETLQLAVQGKRTLPGLQQQQQQQQQQQQQQQQQQQQQQQPQQQPPQPQTQQQQQPALVNYNRPSGPGPELSGPSTPQKLPVPAPGGRPSPAPPAAAQPPAAAVPGPSVPQPAPGQPSPVLQLQQKQSRISPIQKPQGLDPVEILQEREYRLQARIAHRIQELENLPGSLPPDLRTKATVELKALRLLNFQRQLRQEVVACMRRDTTLETALNSKAYKRSKRQTLREARMTEKLEKQQKIEQERKRRQKHQEYLNSILQHAKDFKEYHRSVAGKIQKLSKAVATWHANTEREQKKETERIEKERMRRLMAEDEEGYRKLIDQKKDRRLAYLLQQTDEYVANLTNLVWEHKQAQAAKEKKKRRRRKKKAEENAEGGESALGPDGEPIDESSQMSDLPVKVTHTETGKVLFGPEAPKASQLDAWLEMNPGYEVAPRSDSEESDSDYEEEDEEEESSRQETEEKILLDPNSEEVSEKDAKQIIETAKQDVDDEYSMQYSARGSQSYYTVAHAISERVEKQSALLINGTLKHYQLQGLEWMVSLYNNNLNGILADEMGLGKTIQTIALITYLMEHKRLNGPYLIIVPLSTLSNWTYEFDKWAPSVVKISYKGTPAMRRSLVPQLRSGKFNVLLTTYEYIIKDKHILAKIRWKYMIVDEGHRMKNHHCKLTQVLNTHYVAPRRILLTGTPLQNKLPELWALLNFLLPTIFKSCSTFEQWFNAPFAMTGERVDLNEEETILIIRRLHKVLRPFLLRRLKKEVESQLPEKVEYVIKCDMSALQKILYRHMQAKGILLTDGSEKDKKGKGGAKTLMNTIMQLRKICNHPYMFQHIEESFAEHLGYSNGVINGAELYRASGKFELLDRILPKLRATNHRVLLFCQMTSLMTIMEDYFAFRNFLYLRLDGTTKSEDRAALLKKFNEPGSQYFIFLLSTRAGGLGLNLQAADTVVIFDSDWNPHQDLQAQDRAHRIGQQNEVRVLRLCTVNSVEEKILAAAKYKLNVDQKVIQAGMFDQKSSSHERRAFLQAILEHEEENEEEDEVPDDETLNQMIARREEEFDLFMRMDMDRRREDARNPKRKPRLMEEDELPSWIIKDDAEVERLTCEEEEEKIFGRGSRQRRDVDYSDALTEKQWLRAIEDGNLEEMEEEVRLKKRKRRRNVDKDPAKEDVEKAKKRRGRPPAEKLSPNPPKLTKQMNAIIDTVINYKDSSGRQLSEVFIQLPSRKELPEYYELIRKPVDFKKIKERIRNHKYRSLGDLEKDVMLLCHNAQTFNLEGSQIYEDSIVLQSVFKSARQKIAKEEESEDESNEEEEEEDEEESESEAKSVKVKIKLNKKDDKGRDKGKGKKRPNRGKAKPVVSDFDSDEEQDEREQSEGSGTDDE

SEQ ID NO: 12557 - protein, 1590 aa, Homo Sapiens; identical to SEQ ID NO: 12555

SEQ ID NO: 12558 - protein, 1514 aa, Homo Sapiens
MSTPTDPGAMPHPGPSPGPGPSPGPILGPSPGPGPSPGSVHSMMGPSPGPPSVSHPMPTMGSTDFPQEGMHQMHKPIDGIHDKGIVEDIHCGSMKGTGMRPPHPGMGPPQSPMDQHSQGYMSPHPSPLGAPEHVSSPMSGGGPTPPQMPPSQPGALIPGDPQAMSQPNRGPSPFSPVQLHQLRAQILAYKMLARGQPLPETLQLAVQGKRTLPGLQQQQQQQQQQQQQQQQQQQQQQQPQQQPPQPQTQQQQQPALVNYNRPSGPGPELSGPSTPQKLPVPAPGGRPSPAPPAAAQPPAAAVPGPSVPQPAPGQPSPVLQLQQKQSRISPIQKPQGLDPVEILQEREYRLQARIAHRIQELENLPGSLPPDLRTKATVELKALRLLNFQRQLRQEVVACMRRDTTLETALNSKAYKRSKRQTLREARMTEKLEKQQKIEQERKRRQKHQEYLNSILQHAKDFKEYHRSVAGKIQKLSKAVATWHANTEREQKKETERIEKERMRRLMAEDEEGYRKLIDQKKDRRLAYLLQQTDEYVANLTNLVWEHKQAQAAKEKKKRRRRKKKAEENAEGGESALGPDGEPIDESSQMSDLPVKVTHTETGKVLFGPEAPKASQLDAWLEMNPGYEVAPRSDSEESDSDYEEEDEEEESSRQETEEKILLDPNSEEVSEKDAKQIIETAKQDVDDEYSMQYSARGSQSYYTVAHAISERVEKQSALLINGTLKHYQLQGLEWMVSLYNNNLNGILADEMGLGKTIQTIALITYLMEHKRLNGPYLIIVPLSTLSNWTYEFDKWAPSVVKISYKGTPAMRRSLVPQLRSGKFNVLLTTYEYIIKDKHILAKIRWKYMIVDEGHRMKNHHCKLTQVDLNEEETILIIRRLHKVLRPFLLRRLKKEVESQLPEKVEYVIKCDMSALQKILYRHMQAKGILLTDGSEKDKKGKGGAKTLMNTIMQLRKICNHPYMFQHIEESFAEHLGYSNGVINGAELYRASGKFELLDRILPKLRATNHRVLLFCQMTSLMTIMEDYFAFRNFLYLRLDGTTKSEDRAALLKKFNEPGSQYFIFLLSTRAGGLGLNLQAADTVVIFDSDWNPHQDLQAQDRAHRIGQQNEVRVLRLCTVNSVEEKILAAAKYKLNVDQKVIQAGMFDQKSSSHERRAFLQAILEHEEENEEEDEVPDDETLNQMIARREEEFDLFMRMDMDRRREDARNPKRKPRLMEEDELPSWIIKDDAEVERLTCEEEEEKIFGRGSRQRRDVDYSDALTEKQWLRAIEDGNLEEMEEEVRLKKRKRRRNVDKDPAKEDVEKAKKRRGRPPAEKLSPNPPKLTKQMNAIIDTVINYKDSSGRQLSEVFIQLPSRKELPEYYELIRKPVDFKKIKERIRNHKYRSLGDLEKDVMLLCHNAQTFNLEGSQIYEDSIVLQSVFKSARQKIAKEEESEDESNEEEEEEDEEESESEAKSVKVKIKLNKKDDKGRDKGKGKKRPNRGKAKPVVSDFDSDEEQDEREQSEGSGTDDE

SEQ ID NO: 12559 - protein, 1572 aa, Homo Sapiens; identical to SEQ ID NO: 12556

SEQ ID NO: 12560 - protein, 1428 aa, Homo Sapiens
MSTPTDPGAMPHPGPSPGPGPSPGPILGPSPGPGPSPGSVHSMMGPSPGPPSVSHPMPTMGSTDFPQEGMHQMHKPIDGIHDKGIVEDIHCGSMKGTGMRPPHPGMGPPQSPMDQHSQGYMSPHPSPLGAPEHVSSPMSGGGPTPPQMPPSQPGALIPGDPQAMSQPNRGPSPFSPVQLHQLRAQILAYKMLARGQPLPETLQLAVQGKRTLPGLQQQQQQQQQQQQQQQQQQQQQQQPQQQPPQPQTQQQQQPALVNYNRPSGPGPELSGPSTPQKLPVPAPGGRPSPAPPAAAQPPAAAVPGPSVPQPAPGQPSPVLQLQQKQSRISPIQKPQGLDPVEILQEREYRLQARIAHRIQELENLPGSLPPDLRTKATVELKALRLLNFQRQLRQEVVACMRRDTTLETALNSKAYKRSKRQTLREARMTEKLEKQQKIEQERKRRQKHQEYLNSILQHAKDFKEYHRSVAGKIQKLSKAVATWHANTEREQKKETERIEKERMRRLMAEDEEGYRKLIDQKKDRRLAYLLQQTDEYVANLTNLVWEHKQAQAAKEKKKRRRRKKKAEENAEGGESALGPDGEPIDESSQMSDLPVKVTHTETGKVLFGPEAPKASQLDAWLEMNPGYEVAPRSDSEESDSDYEEEDEEEESSRQETEEKILLDPNSEEVSEKDAKQIIETAKQDVDDEYSMQYSARGSQSYYTVAHAISERVEKQSALLINGTLKHYQLQGLEWMVSLYNNNLNGILADEMGLGKTIQTIALITYLMEHKRLNGPYLIIVPLSTLSNWTYEFDKWAPSVVKISYKGTPAMRRSLVPQLRSGKFNVLLTTYEYIIKDKHILAKIRWKYMIVDEGHRMKNHHCKLTQVLNTHYVAPRRILLTGTPLQNKLPELWALLNFLLPTIFKSCSTFEQWFNAPFAMTGERVDLNEEETILIIRRLHKVLRPFLLRRLKKEVESQLPEKVEYVIKCDMSALQKILYRHMQAKGILLTDGSEKDKKGKGGAKTLMNTIMQLRKICNHPYMFQHIEESFAEHLGYSNGVINGAELYRASGKFELLDRILPKLRATNHRVLLFCQMTSLMTIMEDYFAFRNFLYLRLDGTTKSEDRAALLKKFNEPGSQYFIFLLSTRAGGLGLNLQAADTVVIFDSDWNPHQDLQAQDRAHRIGQQNEVRVLRLCTVNSVEEKILAAAKYKLNVDQKVIQAGMFDQKSSSHERRAFLQAILEHEEENEEEDEVPDDETLNQMIARREEEFDLFMRMDMDRRREDARNPKRKPRLMEEDELPSWIIKDDAEVERLTCEEEEEKIFGRGSRQRRDVDYSDALTEKQWLRAIEDGNLEEMEEEVRLKKRKRRRNVDKDPAKEDVEKAKKRRGRPPAEKLSPNPPKLTKQMNAIIDTVINYKDRCNVEKVPSNSQLEIEGNRKGFVIISTGA

SEQ ID NO: 12561 - protein, 279 aa, Homo Sapiens
MSTPTDPGAMPHPGPSPGPGPSPGPILGPSPGPGPSPGSVHSMMGPSPGPPSVSHPMPTMGSTDFPQEGMHQMHKPIDGIHDKGIVEDIHCGSMKGTGMRPPHPGMGPPQSPMDQHSQGYMSPHPSPLGAPEHVSSPMSGGGPTPPQMPPSQPGALIPGDPQAMSQPNRGPSPFSPVQLHQLRAQILAYKMLARGQPLPETLQLAVQGKRTLPGLQQQQQQQQQQQQQQQQQQQQQQQPQQQPPQPQTQQQQQPALVNYNRPSGRLIRNQMNNAMVQLG

SEQ ID NO: 12562 - protein, 288 aa, Homo Sapiens
MSTPTDPGAMPHPGPSPGPGPSPGPILGPSPGPGPSPGSVHSMMGPSPGPPSVSHPMPTMGSTDFPQEGMHQMHKPIDGIHDKGIVEDIHCGSMKGTGMRPPHPGMGPPQSPMDQHSQGYMSPHPSPLGAPEHVSSPMSGGGPTPPQMPPSQPGALIPGDPQAMSQPNRGPSPFSPVQLHQLRAQILAYKMLARGQPLPETLQLAVQGKRTLPGLQQQQQQQQQQQQQQQQQQQQQQQPQQQPPQPQTQQQQQPALVNYNRPSALNAGNSNLKTPADSVSGEGLLPDS

SEQ ID NO: 12563 - protein, 279 aa, Homo Sapiens; identical to SEQ ID NO: 12561

SEQ ID NO: 12564 - protein, 288 aa, Homo Sapiens; identical to SEQ ID NO: 12562

SEQ ID NO: 12565 - protein, 183 aa, Homo Sapiens [sequence omitted]

SEQ ID NO: 12566 - protein, 248 aa, Homo Sapiens
MWLAIEDGNLEEMEEEVRLKKRKRRRNVDKDPAKEDVEKAKKRRGRPPAEKLSPNPPKLTKQMNAIIDTVINYKDSSGRQLSEVFIQLPSRKELPEYYELIRKPVDFKKIKERIRNHKYRSLGDLEKDVMLLCHNAQTFNLEGSQIYEDSIVLQSVFKSARQKIAKEEESEDESNEEEEEEDEEESESEAKSVKVKIKLNKKDDKGRDKGKGKKRPNRGKAKPVVSDFDSDEEQDEREQSEGSGTDDE

SEQ ID NO: 12567 - protein, 271 aa, Homo Sapiens
  misc_feature (1)..(1): Xaa can be any naturally occurring amino acid
XEEEKIFGRGSRQRRDVDYSDALTEKQWLRAIEDGNLEEMEEEVRLKKRKRRRNVDKDPAKEDVEKAKKRRGRPPAEKLSPNPPKLTKQMNAIIDTVINYKDSSGRQLSEVFIQLPSRKELPEYYELIRKPVDFKKIKERIRNHKYRSLGDLEKDVMLLCHNAQTFNLEGSQIYEDSIVLQSVFKSARQKIAKEEESEDESNEEEEEEDEEESESEAKSVKVKIKLNKKDDKGRDKGKGKKRPNRGKAKPVVSDFDSDEEQDERVSVADWD

SEQ ID NO: 12568 - protein, 270 aa, Homo Sapiens
  misc_feature (1)..(1): Xaa can be any naturally occurring amino acid
XLNLQAADTVVIFDSDWNPHQEEDEVPDDETLNQMIARREEEFDLFMRMDMDRRREDARNPKRKPRLMEEDELPSWIIKDDAEVERLTCEEEEEKIFGRGSRQRRDVDYSDALTEKQWLRAIEDGNLEEMEEEVRLKKRKRRRNVDKDPAKEDVEKAKKRRGRPPAEKLSPNPPKLTKQMNAIIDTVINYKDSSGRQLSEVFIQLPSRKELPEYYELIRKPVDFKKIKERIRNHKYRSLGDLEKDVMLLCHNAQTFNLEGSQIYEDSIVL

SEQ ID NO: 12569 - protein, 228 aa, Homo Sapiens
  misc_feature (1)..(1): Xaa can be any naturally occurring amino acid
XNSEEVSEKDAKQIIETAKQDVDDEYSMQYSARGSQSYYTVAHAISERVEKQSALLINGTLKHYQLQGLEWMVSLYNNNLNGILADEMGLGKTIQTIALITYLMEHKRLNGPYLIIVPLSTLSNWTYEFDKWAPSVVKISYKGTPAMRRSLVPQLRSGKFNVLLTTYEYIIKDKHILAKVDLNEEETILIIRRLHKVLRPFLLRRLKKEVESQLPEKVEYVIKCDMSA

SEQ ID NO: 12570 - protein, 58 aa, Homo Sapiens
  misc_feature (1)..(1): Xaa can be any naturally occurring amino acid
XPFPSSLFFPDQLMKRLAARCFAGLLILSPLTVISDSRPADSGHRRRQFGGNGRGSTA

SEQ ID NO: 12571 - protein, 38 aa, Homo Sapiens
  misc_feature (1)..(1): Xaa can be any naturally occurring amino acid
XSGRQLSEVFIQLPSRKELPEYYELIRKPVDFKKIKDS

SEQ ID NO: 12572 - protein, 1419 aa, Homo Sapiens
MAEGLERVRISASELRGILATLAPQAGSRENMKELKEARPRKDNRRPDLEIYKPGLSRLRNKPKIKEPPGSEEFKDEIVNDRDCSAVENGTQPVKDVCKELNNQEQNGPIDPENNRGQESFPRTAGQEDRSLKIIKRTKKPDLQIYQPGRRLQTVSKESASRVEEEEVLNQVEQLRVEEDECRGNVAKEEVANKPDRAEIEKSPGGGRVGAAKGEKGKRMGKGEGVRETHDDPARGRPGSAKRYSRSDKRRNRYRTRSTSSAGSNNSAEGAGLTDNGCRRRRQDRTKERPRLKKQVSVSSTDSLDEDRIDEPDGLGPRRSSERKRHLERNWSGRGEGEQKNSAKEYRGTLRVTFDAEAMNKESPMVRSARDDMDRGKPDKGLSSGGKGSEKQESKNPKQELRGRGRGILILPAHTTLSVNSAGSPESAPLGPRLLFGSGSKGSRSWGRGGTTRRLWDPNNPDQKPALKTQTPQLHFLDTDDEVSPTSWGDSRQAQASYYKFQNSDNPYYYPRTPGPASQYPYTGYNPLQYPVGPTNGVYPGPYYPGYPTPSGQYVCSPLPTSTMSPEEVEQHMRNLQQQELHRLLRVADNQELQLSNLLSRDRISPEGLEKMAQLRAELLQLYERCILLDIEFSDNQNVDQILWKNAFYQVIEKFRQLVKDPNVENPEQIRNRLLELLDEGSDFFDSLLQKLQVTYKFKLEDYMDGLAIRSKPLRKTVKYALISAQRCMICQGDIARYREQASDTANYGKARSWYLKAQHIAPKNGRPYNQLALLAVYTRRKLDAVYYYMRSLAASNPILTAKESLMSLFEETKRKAEQMEKKQHEEFDLSPDQWRKGKKSTFRHVGDDTTRLEIWIHPSHPRSSQGTESGKDSEQENGLGSLSPSDLNKRFILSFLHAHGKLFTRIGMETFPAVAEKVLKEFQVLLQHSPSPIGSTRMLQLMTINMFAVHNSQLKDCFSEECRSVIQEQAAALGLAMFSLLVRRCTCLLKESAKAQLSSPEDQDDQDDIKVSSFVPDLKELLPSVKVWSDWMLGYPDTWNPPPTSLDLPSHVAVDVWSTLADFCNILTAVNQSEVPLYKDPDDDLTLLILEEDRLLSGFVPLLAAPQDPCYVEKTSDKVIAADCKRVTVLKYFLEALCGQEEPLLAFKGGKYVSVAPVPDTMGKEMGSQEGTRLEDEEEDVVIEDFEEDSEAEGSGGEDDIRELRAKKLALARKIAEQQRRQEKIQAVLEDHSQMRQMELEIRPLFLVPDTNGFIDHLASLARLLESRKYILVVPLIVINELDGLAKGQETDHRAGGYARVVQEKARKSIEFLEQRFESRDSCLRALTSRGNELESIAFRSEDITGQLGNNDDLILSCCLHYCKDKAKDFMPASKEEPIRLLREVVLLTDDRNLRVKALTRNVPVRDIPAFLTWAQVG

SEQ ID NO: 12573 - protein, 119 aa, Homo Sapiens
METFPAVAEKVLKEFQVLLQHSPSPIGSTRMLQLMTINMFAVHNSQLKDCFSEECRSVIQEQAAALGLAMFSLLVRRCTCLLKESAKAQLSSPEDQDDQDDIKVSSFVPDLKELLPSVK

SEQ ID NO: 12574 - protein, 123 aa, Homo Sapiens
METFPAVAEKVLKEFQVLLQHSPSPIGSTRMLQLMTINMFAVHNSQLKDCFSEECRSVIQEQAAALGLAMFSLLVRRCTCLLKESAKAQLSSPEDQDDQDDIKVSSFVPDLKELLPSVKVWSD

SEQ ID NO: 12575 - protein, 162 aa, Homo Sapiens
METFPAVAEKVLKEFQVLLQHSPSPIGSTRMLQLMTINMFAVHNSQLKDCFSEECRSVIQEQAAALGLAMFSLLVRRCTCLLKESAKAQLSSPEDQDDQDDIKVSSFVPDLKELLPSVKVWSDWMLGYPDTWNPPPTSLDLPSHVAVDVWSTLADFCNILTA

SEQ ID NO: 12576 - protein, 163 aa, Homo Sapiens
METFPAVAEKVLKEFQVLLQHSPSPIGSTRMLQLMTINMFAVHNSQLKDCFSEECRSVIQEQAAALGLAMFSLLVRRCTCLLKESAKAQLSSPEDQDDQDDIKVSSFVPDLKELLPSVKVWSDWMLGYPDTWNPPPTSLDLPSHVAVDVWSTLADFCNILTAV

SEQ ID NO: 12577 - protein, 164 aa, Homo Sapiens
METFPAVAEKVLKEFQVLLQHSPSPIGSTRMLQLMTINMFAVHNSQLKDCFSEECRSVIQEQAAALGLAMFSLLVRRCTCLLKESAKAQLSSPEDQDDQDDIKVSSFVPDLKELLPSVKVWSDWMLGYPDTWNPPPTSLDLPSHVAVDVWSTLADFCNILTAVN

SEQ ID NO: 12578 - protein, 511 aa, Homo Sapiens
METFPAVAEKVLKEFQVLLQHSPSPIGSTRMLQLMTINMFAVHNSQLKDCFSEECRSVIQEQAAALGLAMFSLLVRRCTCLLKESAKAQLSSPEDQDDQDDIKVSSFVPDLKELLPSVKVWSDWMLGYPDTWNPPPTSLDLPSHVAVDVWSTLADFCNILTAVNQSEVPLYKDPDDDLTLLILEEDRLLSGFVPLLAAPQDPCYVEKTSDKVIAADCKRVTVLKYFLEALCGQEEPLLAFKGGKYVSVAPVPDTMGKEMGSQEGTRLEDEEEDVVIEDFEEDSEAEGSGGEDDIRELRAKKLALARKIAEQQRRQEKIQAVLEDHSQMRQMELEIRPLFLVPDTNGFIDHLASLARLLESRKYILVVPLIVINELDGLAKGQETDHRAGGYARVVQEKARKSIEFLEQRFESRDSCLRALTSRGNELESIAFRSEDITGQLGNNDDLILSCCLHYCKDKAKDFMPASKEEPIRLLREVVLLTDDRNLRVKALTRNVPVRDIPAFLTWAQVG

SEQ ID NO: 12579 - protein, 511 aa, Homo Sapiens; identical to SEQ ID NO: 12578

SEQ ID NO: 12580 - protein, 115 aa, Homo Sapiens
MFSLLVRRCTCLLKESAKAQLSSPEDQDDQDDIKVSSFVPDLKELLPSVKVWSDWMLGYPDTWNPPPTSLDLPSHVAVDVWSTLADFCNILTAVNQSEVPLYKDPDDDLTLLILE

SEQ ID NO: 12581 - protein, 124 aa, Homo Sapiens
MFSLLVRRCTCLLKESAKAQLSSPEDQDDQDDIKVSSFVPDLKELLPSVKVWSDWMLGYPDTWNPPPTSLDLPSHVAVDVWSTLADFCNILTAVNQSEVPLYKDPDDDLTLLILEEDRLLSGFV

SEQ ID NO: 12582 - protein, 139 aa, Homo Sapiens
MFSLLVRRCTCLLKESAKAQLSSPEDQDDQDDIKVSSFVPDLKELLPSVKVWSDWMLGYPDTWNPPPTSLDLPSHVAVDVWSTLADFCNILTAVNQSEVPLYKDPDDDLTLLILEEDRLLSGFVPLLAAPQDPCYVEKT

SEQ ID NO: 12583 - protein, 208 aa, Homo Sapiens
MTGPCIRQLSLQILFPLCVAVDVWSTLADFCNILTAVNQSEVPLYKDPDDDLTLLILEEDRLLSGFVPLLAAPQDPCYVEKTSDKVIAADCKRVTVLKYFLEALCGQEEPLLAFKGGKYVSVAPVPDTMGKEMGSQEGTRLEDEEEDVVIEDFEEDSEAEGSGGEDDIRELRAKKLALARKIAEQQRRQEKIQAVLEDHSQMRQMELE

SEQ ID NO: 12584 - protein, 49 aa, Homo Sapiens
MIGDILLFGTLLMNAGAVLNFKLKKKDTQGFGEESREPSTGCSALESQR

SEQ ID NO: 12585 - protein, 49 aa, Homo Sapiens; identical to SEQ ID NO: 12584

SEQ ID NO: 12586 - protein, 49 aa, Homo Sapiens; identical to SEQ ID NO: 12584

SEQ ID NO: 12587 - protein, 49 aa, Homo Sapiens; identical to SEQ ID NO: 12584

SEQ ID NO: 12588 - protein, 75 aa, Homo Sapiens
MIGDILLFGTLLMNAGAVLNFKLKKKDTQGFGEESREPSTGDNIREFLLSLRYFRIFIALWNIFMMFCMIVLFGS

SEQ ID NO: 12589 - protein, 75 aa, Homo Sapiens; identical to SEQ ID NO: 12588

SEQ ID NO: 12590 - protein, 75 aa, Homo Sapiens; identical to SEQ ID NO: 12588

SEQ ID NO: 12591 - protein, 75 aa, Homo Sapiens; identical to SEQ ID NO: 12588

SEQ ID NO: 12592 - protein, 75 aa, Homo Sapiens; identical to SEQ ID NO: 12588

SEQ ID NO: 12593 - protein, 75 aa, Homo Sapiens; identical to SEQ ID NO: 12588

SEQ ID NO: 12594 - protein, 103 aa, Homo Sapiens
MIGDILLFGTLLMNAGAVLNFKLKKKDTQGFGEESREPSTGDNIREFLLSLRYFRIFIALWNIFMMFCMIVLRKLKQIAFPSSTGAITLILLLTNCEICCKWI

SEQ ID NO: 12595 - protein, 103 aa, Homo Sapiens; identical to SEQ ID NO: 12594

SEQ ID NO: 12596 - protein, 103 aa, Homo Sapiens; identical to SEQ ID NO: 12594

SEQ ID NO: 12597 - protein, 47 aa, Homo Sapiens
MIGDILLFGTLLMNAGAVLNFKLKKKDTQGFGEESREPSTGLERESD

SEQ ID NO: 12598 - protein, 56 aa, Homo Sapiens
MIGDILLFGTLLMNAGAVLNFKLKKKDTQGFGEESREPSTGWSAVVRSWLTADSTS

SEQ ID NO: 12599 - protein, 63 aa, Homo Sapiens
MNAGAVLNFKLKKKDTQGFGEESREPSTGDNIREFLLSLRYFRIFIALWNIFMMFCMIVLFGS

SEQ ID NO: 12600 - protein, 63 aa, Homo Sapiens; identical to SEQ ID NO: 12599

SEQ ID NO: 12601 - protein, 435 aa, Homo Sapiens
MLPARCARLLTPHLLLVLVQLSPARGHRTTGPRFLISDRDPQCNLHCSRTQPKPICASDGRSYESMCEYQRAKCRDPTLGVVHRGRCKDAGQSKCRLERAQALEQAKKPQEAVFVPECGEDGSFTQVQCHTYTGYCWCVTPDGKPISGSSVQNKTPVCSGSVTDKPLSQGNSGRKDDGSKPTPTMETQPVFDGDEITAPTLWIKHLVIKDSKLNNTNIRNSEKVYSCDQERQSALEEAQQNPREGIVIPECAPGGLYKPVQCHQSTGYCWCVLVDTGRPLPGTSTRYVMPSCESDARAKTTEADDPFKDRELPGCPEGKKMEFITSLLDALTTDMVQAINSAAPTGGGRFSEPDPSHTLEERVVHWYFSQLDSNSSNDINKREMKPFKRYVKKKAKPKKCARRFTDYCDLNKDKVISLPELKGCLGVSKEVGRLV

SEQ ID NO: 12602 - protein, 434 aa, Homo Sapiens
MLPARCARLLTPHLLLVLVQLSPARGHRTTGPRFLISDRDPQCNLHCSRTQPKPICASDGRSYESMCEYQRAKCRDPTLGVVHRGRCKDAGQSKCRLERAQALEQAKKPQEAVFVPECGEDGSFTQVQCHTYTGYCWCVTPDGKPISGSSVQNKTPVCSGSVTDKPLSQGNSGRKDDGSKPTPTMETQPVFDGDEITAPTLWIKHLVIKDSKLNNTNIRNSEKVYSCDQERQSALEEAQQNPREGIVIPECAPGGLYKPVQCHQSTGYCWCVLVDTGRPLPGTSTRYVMPSCESDARAKTTEADDPFKDRELPGCPEGKKMEFITSLLDALTTDMVQAINSAAPTGGGRFSEPDPSHTLEERVVHWYFSQLDSNSSNDINKREMKPFKRYVKKKAKPKKCARRFTDYCDLNKDKVISLPELKGCLGVSKEGRLV

SEQ ID NO: 12603 - protein, 67 aa, Homo Sapiens
GKKEIKPFKRFLRKKSKPKKCVKKFVEYCDVNNDKSISVQELMGCLGVAKEDGKADTKKRHRSKRNL

SEQ ID NO: 12604 - protein, 84 aa, Homo Sapiens
KKSKPKKCVKKFVEYCDVNNDKSISVQELMGCLGVAKEDGKADTKKRHTPRGHAESTSNRQDAMVVSSRPKATTHRKSRTLSRR

SEQ ID NO: 12605 - protein, 446 aa, Homo Sapiens
MLLPQLCWLPLLAGLLPPVPAQKFSALTFLRVDQDKDKDCSLDCAGSPQKPLCASDGRTFLSRCEFQRAKCKDPQLEIAYRGNCKDVSRCVAERKYTQEQARKEFQQVFIPECNDDGTYSQVQCHSYTGYCWCVTPNGRPISGTAVAHKTPRCPGSVNEKLPQREGTGKTDDAAAPALETQPQGDEEDIASRYPTLWTEQVKSRQNKTNKNSVSSCDQEHQSALEEAKQPKNDNVVIPECAHGGLYKPVQCHPSTGYCWCVLVDTGRPIPGTSTRYEQPKCDNTARAHPAKARDLYKGRQLQGCPGAKKHEFLTSVLDALSTDMVHAASDPSSSSGRLSEPDPSHTLEERVVHWYFKLLDKNSSGDIGKKEIKPFKRFLRKKSKPKKCVKKFVEYCDVNNDKSISVQELMGCLGVAKEDGKADTKKRHTPRGHAESTSNRQPRKQG

SEQ ID NO: 12606 - protein, 457 aa, Homo Sapiens
MLLPQLCWLPLLAGLLPPVPAQKFSALTFLRVDQDKDKDCSLDCAGSPQKPLCASDGRTFLSRCEFQRAKCKDPQLEIAYRGNCKDVSRCVAERKYTQEQARKEFQQVFIPECNDDGTYSQVQCHSYTGYCWCVTPNGRPISGTAVAHKTPRCPGSVNEKLPQREGTGKTVSLQIFSVLNSDDAAAPALETQPQGDEEDIASRYPTLWTEQVKSRQNKTNKNSVSSCDQEHQSALEEAKQPKNDNVVIPECAHGGLYKPVQCHPSTGYCWCVLVDTGRPIPGTSTRYEQPKCDNTARAHPAKARDLYKGRQLQGCPGAKKHEFLTSVLDALSTDMVHAASDPSSSSGRLSEPDPSHTLEERVVHWYFKLLDKNSSGDIGKKEIKPFKRFLRKKSKPKKCVKKFVEYCDVNNDKSISVQELMGCLGVAKEDGKADTKKRHTPRGHAESTSNRQPRKQG

SEQ ID NO: 12607 - protein, 136 aa, Homo Sapiens
MVGGCLGGSKSSHSAWEGPILPKCKSSRGVTELANRLVCLVFLLHVDIILLILLPGPPQGYRKVKSSPEPIMSSLLTEGTAGYVVPPGLVLAAGGGAGSPRFLSAFLNASRVRELANGKFIRVALAEKDRSGMPTQ

SEQ ID NO: 12608 - protein, 453 aa, Homo Sapiens
MALVRALVCCLLTAWHCRSGLGLPVAPAGGRNPPPAIGQFWHVTDLHLDPTYHITDDHTKVCASSKGANASNPGPFGDVLCDSPYQLILSAFDFIKNSGQEASFMIWTGDSPPHVPVPELSTDTVINVITNMTTTIQSLFPNLQVFPALGNHDYWPQDQLPVVTSKVYNAVANLWKPWLDEEAISTLRKGGFYSQKVTTNPNLRIISLNTNLYYGPNIMTLNKTDPANQFEWLESTLNNSQQNKEKVYIIAHVPVGYLPSSQNITAMREYYNEKLIDIFQKYSDVIAGQFYGHTHRDSIMVLSDKKGSPVNSLFVAPAVTPVKSVLEKQTNNPGIRLFQYDPRDYKLLDMLQYYLNLTEANLKGESIWKLEYILTQTYDIEDLQPESLYGLAKQFTILDSKQFIKYYNYFFVSYDSSVTCDKTCKAFQICAIMNLDNISYADCLKQLYIKHNY

SEQ ID NO: 12609 - protein, 322 aa, Homo Sapiens
MTTTIQSLFPNLQVFPALGNHDYWPQDQLPVVTSKVYNAVANLWKPWLDEEAISTLRKGGFYSQKVTTNPNLRIISLNTNLYYGPNIMTLNKTDPANQFEWLESTLNNSQQNKEKVYIIAHVPVGYLPSSQNITAMREYYNEKLIDIFQKYSDVIAGQFYGHTHRDSIMVLSDKKGSPVNSLFVAPAVTPVKSVLEKQTNNPGIRLFQYDPRDYKLLDMLQYYLNLTEANLKGESIWKLEYILTQTYDIEDLQPESLYGLAKQFTILDSKQFIKYYNYFFVSYDSSVTCDKTCKAFQICAIMNLDNISYADCLKQLYIKHNY

SEQ ID NO: 12610 - protein, 269 aa, Homo Sapiens
MRLLAWLIFLANWGGARAEPEEAQGPCAQEKGKGPPPTSILASLAPGLEAGKFWHIADLHLDPDYKVSKDPFQVCPSAGSQPVPDAGPWGDYLCDSPWALINSSIYAMKEIEPEPDFILWTGDDTPHVPDEKLGEAAVLEIVERLTKLIREVFPDTKVYAALGNHDFHPKNQFPAGSNNIYNQIAELWKPWLSNESIALFKKGAFYCEKLPGPSGAGRIVVLNTNLYYTSNALTADMADPGQQFQWLEDVLTDASKAGDMVYIVGHVPP

SEQ ID NO: 12611 - protein, 102 aa, Homo Sapiens
MRLLAWLIFLANWGGARAEPGKFWHIADLHLDPDYKVSKDPFQVCPSAGSQPVPDAGPWGDYLCDSPWALINSSIYAMKEIEPEPDFILWTGAVPSFSSAAS

SEQ ID NO: 12612 - protein, 455 aa, Homo Sapiens
MRLLAWLIFLANWGGARAEPGKFWHIADLHLDPDYKVSKDPFQVCPSAGSQPVPDAGPWGDYLCDSPWALINSSIYAMKEIEPEPDFILWTGDDTPHVPDEKLGEAAVLEIVERLTKLIREVFPDTKVYAALGNHDFHPKNQFPAGSNNIYNQIAELWKPWLSNESIALFKKGAFYCEKLPGPSGAGRIVVLNTNLYYTSNALTADMADPGQQFQWLEDVLTDASKAGDMVYIVGHVPPGFFEKTQNKAWFREGFNEKYLKVVRKHHRVIAGQFFGHHHTDSFRMLYDDAGVPISAMFITPGVTPWKTTLPGVVNGANNPAIRVFEYDRATLSLKDMVTYFMNLSQANAQGTPRWELEYQLTEAYGVPDASAHSMHTVLDRIAGDQSTLQRYYVYNSVSYSAGVCDEACSMQHVCAMRQVDIDAYTTCLYASGTTPVPQLPLLLMALLGLCTLVL

SEQ ID NO: 12613 - protein, 373 aa, Homo Sapiens
MRLLAWLIFLANWGGARAEPGKFWHIADLHLDPDYKVSKDPFQVCPSAGSQPVPDAGPWGDYLCDSPWALINSSIYAMKEIEPEPDFILWTGDDTPHVPDEKLGEAAVLEIVERLTKLIREVFPDTKVYAALGNHDFHPKNQFPAGSNNIYNQIAELWKPWLSNESIALFKKGAFYCEKLPGPSGAGRIVVLNTNLYYTSNALTADMADPGQQFQWLEDVLTDASKAGDMVYIVGHVPPGFFEKTQNKAWFREGFNEKYLKVVRKHHRVIAGQFFGHHHTDSFRMLYDDAGVPISAMFITPGVTPWKTTLPGVVNGANNPAIRVFEYDRATLSLKVRSPAEARGGGWEGLKCITTFPHSQLIHLPLTTEPQEG

SEQ ID NO: 12614 - protein, 407 aa, Homo Sapiens
MRLLAWLIFLANWGGARAEPGKFWHIADLHLDPDYKVSKDPFQVCPSAGSQPVPDAGPWGDYLCDSPWALINSSIYAMKEIEPEPDFILWTGDDTPHVPDEKLGEAAVLEIVERLTKLIREVFPGAFYCEKLPGPSGAGRIVVLNTNLYYTSNALTADMADPGQQFQWLEDVLTDASKAGDMVYIVGHVPPGFFEKTQNKAWFREGFNEKYLKVVRKHHRVIAGQFFGHHHTDSFRMLYDDAGVPISAMFITPGVTPWKTTLPGVVNGANNPAIRVFEYDRATLSLKDMVTYFMNLSQANAQGTPRWELEYQLTEAYGVPDASAHSMHTVLDRIAGDQSTLQRYYVYNSVSYSAGVCDEACSMQHVCAMRQVDIDAYTTCLYASGTTPVPQLPLLLMALLGLCTLVL

SEQ ID NO: 12615 - protein, 134 aa, Homo Sapiens
MKSLTWILGLWALAACFTPGESQRGPRGPYPPGPLAPPPPPCFPFGTGFVPPPHPPPYGPGRFPPPLSPPYGPGRIPPSPPPPYGPGRIQSHSLPPPYGPGYPQPPSQPRPYPPGPPFFPVNSPTDPALPTPAP

SEQ ID NO: 12616 - protein, 79 aa, Homo Sapiens
MKSLTWILGLWALAACFTPGESQRGPRGPYPPGPLAPPQPFGPGFVPPPPPPPYGPGRIPPPPPAPYGPGIFPPPPPQP

SEQ ID NO: 12617 - protein, 79 aa, Homo Sapiens; identical to SEQ ID NO: 12616

SEQ ID NO: 12618 - protein, 79 aa, Homo Sapiens; identical to SEQ ID NO: 12616

SEQ ID NO: 12619 - protein, 599 aa, Homo Sapiens
MHGILGACGRLRLEPATPLTPLLCAERDECRAHPCRNGGSCRNLPGAYVCRCPAGFVGVHCETEVDACDSSPCQHGGRCESGGGAYLCVCPESFFGYHCETVSDPCFSSPCGGRGYCLASNGSHSCTCKVGYTGEDCAKELFPPTALKMERVEESGVSISWNPPNGPAARQMLDGYAVTYVSSDGSYRRTDFVDRTRSSHQLQALAAGRAYNISVFSVKRNSNNKNDISRPAVLLARTRPRPVEGFEVTNVTASTISVQWALHRIRHATVSGVRVSIRHPEALRDQATDVDRSVDRFTFRALLPGKRYTIQLTTLSGLRGEEHPTESLATAPTHVWTRPLPPANLTAARVTATSAHVVWDAPTPGSLLEAYVINVTTSQSTKSRYVPNGKLASYTVRDLLPGRRYQLSVIAVQSTELGPQHSEPAHLYIITSPRDGADRRWHQGGHHPRVLKNRPPPARLPELRLLNDHSAPETPTQPPRFSELVDGRGRVSARFGGSPSKAATVRSHVPGNCSENPCQNGGTCVPGADAHSCDCGPGFKGRRCELACIKVSRPCTRLFSETKAFPVWEGGVCHHVYKRVYRVHQDICFKESCESTSLK

SEQ ID NO: 12620 - protein, 1413 aa, Homo Sapiens
MRHGVAWALLVAAALGLGARGVRGAVALADFYPFGAERGDAVTPKQDDGGSGLRPLSVPFPFFGAEHSGLYVNNNGIISFLKEVSQFTPVAFPIAKDRCVVAAFWADVDNRRAGDVYYREATDPAMLRRATEDVRHYFPELLDFNATWVFVATWYRVTFFGGSSSSPVNTFQTVLITDGKLSFTIFNYESIVWTTGTHASSGGNATGLGGIAAQAGFNAGDGQRYFSIPGSRTADMAEVETTTNVGVPGRWAFRIDDAQVRVGGCGHTTSVCLALRPCLNGGKCIDDCVTGNPSYTCSCLSGFTGRRCHLDVNECASQPCQNGGTCTHGINSFRCQCPAGFGGPTCETAQSPCDTKECQHGGQCQVENGSAVCVCQAGYTGAACEMDVDDCSPDPCLNGGSCVDLVGNYTCLCAEPFKGLRCETGDHPVPDACLSAPCHNGGTCVDADQGYVCECPEGFMGLDCRERVPDDCECRNGGRCLGANTTLCQCPLGFFGLLCEFEITAMPCNMNTQCPDGGYCMEHGGSYLCVCHTDHNASHSLPSPCDSDPCFNGGSCDAHDDSYTCECPRGFHGKHCEKARPHLCSSGPCRNGGTCKEAGGEYHCSCPYRFTGRHCEIGKPDSCASGPCHNGGTCFHYIGKYKCDCPPGFSGRHCEIAPSPCFRSPCVNGGTCEDRDTDFFCHCQAGYMGRRCQAEVDCGPPEEVKHATLRFNGTRLGAVALYACDRGYSLSAPSRIRVCQPHGVWSEPPQCLEIDECRSQPCLHGGSCQDRVAGYLCLCSTGYEGAHCELERDECRAHPCRNGGSCRNLPGAYVCRCPAGFVGVHCETEVDACDSSPCQHGGRCESGGGAYLCVCPESFFGYHCETVSDPCFSSPCGGRGYCLASNGSHSCTCKVGYTGEDCAKELFPPTALKMERVEESGVSISWNPPNGPAARQMLDGYAVTYVSSDGSYRRTDFVDRTRSSHQLQALAAGRAYNISVFSVKRNSNNKNDISRPAVLLARTRPRPVEGFEVTNVTASTISVQWALHRIRHATVSGVRVSIRHPEALRDQATDVDRSVDRFTFRALLPGKRYTIQLTTLSGLRGEEHPTESLATAPTHVWTRPLPPANLTAARVTATSAHVVWDAPTPGSLLEAYVINVTTSQSTKSRYVPNGKLASYTVRDLLPGRRYQLSVIAVQSTELGPQHSEPAHLYIITSPRDGADRRWHQGGHHPRVLKNRPPPARLPELRLLNDHSAPETPTQPPRFSELVDGRGRVSARFGGSPSKAATVRSQPTASAQLENMEEAPKRVSLALQLPEHGSKDIGNVPGNCSENPCQNGGTCVPGADAHSCDCGPGFKGRRCELACIKVSRPCTRLFSETKAFPVWEGGVCHHVYKRVYRVHQDICFKESCESTSLKKTPNRKQSKSQTLEKS

SEQ ID NO: 12621 - protein, 1324 aa, Homo Sapiens
MRHGVAWALLVAAALGLGARGVRGAVALADFYPFGAERGDAVTPKQDDGGSGLRPLSVPFPFFGAEHSGLYVNNNGIISFLKEVSQFTPVAFPIAKDRCVVAAFWADVDNRRAGDVYYREATDPAMLRRATEDVRHYFPELLDFNATWVFVATWYRVTFFGGSSSSPVNTFQTVLITDGKLSFTIFNYESIVWTTGTHASSGGNATGLGGIAAQAGFNAGDGQRYFSIPGSRTADMAEVETTTNVGVPGRWAFRIDDAQVRVGGCGHTTSVCLALRPCLNGGKCIDDCVTGNPSYTCSCLSGFTGRRCHLDVNECASQPCQNGGTCTHGINSFRCQCPAGFGGPTCETAQSPCDTKECQHGGQCQVENGSAVCVCQAGYTGAACEMDVDDCSPDPCLNGGSCVDLVGNYTCLCAEPFKGLRCETGDHPVPDACLSAPCHNGGTCVDADQGYVCECPEGFMGLDCRERVPDDCECRNGGRCLGANTTLCQCPLGFFGLLCEFEITAMPCNMNTQCPDGGYCMEHGGSYLCVCHTDHNASHSLPSPCDSDPCFNGGSCDAHDDSYTCECPRGFHGKHCEKARPHLCSSGPCRNGGTCKEAGGEYHCSCPYRFTGRHCEIGKPDSCASGPCHNGGTCFHYIGKYKCDCPPGFSGRHCEIAPSPCFRSPCVNGGTCEDRDTDFFCHCQAGYMGRRCQAEVDCGPPEEVKHATLRFNGTRLGAVALYACDRGYSLSAPSRIRVCQPHGVWSEPPQCLEIDECRSQPCLHGGSCQDRVAGYLCLCSTGYEGAHCELERDECRAHPCRNGGSCRNLPGAYVCRCPAGFVGVHCETEVDACDSSPCQHGGRCESGGGAYLCVCPESFFGYHCETVSDPCFSSPCGGRGYCLASNGSHSCTCKVGYTGEDCAKELFPPTALKMERVEESGVSISWNPPNGPAARQMLDGYAVTYVSSDGSYRRTDFVDRTRSSHQLQALAAGRAYNISVFSVKRNSNNKNDISRPAVLLARTRPRPVEGFEVTNVTASTISVQWALHRIRHATVSGVRVSIRHPEALRDQATDVDRSVDRFTFRALLPGKRYTIQLTTLSGLRGEEHPTESLATAPTHVWTRPLPPANLTAARVTATSAHVVWDAPTPGSLLEAYVINVTTSQSTKSRYVPNGKLASYTVRDLLPGRRYQLSVIAVQSTELGPQHSEPAHLYIITSPRDGADRRWHQGGHHPRVLKNRPPPARLPELRLLNDHSAPETPTQPPRFSELVDGRGRVSARFGGSPSKAATVRSQPTASAQLENMEEAPKRVSLALQLPEHGSKDIGSESAALVGTLGLTDCSQGP

SEQ ID NO: 12622 - protein, 1352 aa, Homo Sapiens
MRHGVAWALLVAAALGLGARGVRGAVALADFYPFGAERGDAVTPKQDDGGSGLRPLSVPFPFFGAEHSGLYVNNNGIISFLKEVSQFTPVAFPIAKDRCVVAAFWADVDNRRAGDVYYREATDPAMLRRATEDVRHYFPELLDFNATWVFVATWYRVTFFGGSSSSPVNTFQTVLITDGKLSFTIFNYESIVWTTGTHASSGGNATGLGGIAAQAGFNAGDGQRYFSIPGSRTADMAEVETTTNVGVPGRWAFRIDDAQVRVGGCGHTTSVCLALRPCLNGGKCIDDCVTGNPSYTCSCLSGFTGRRCHLDVNECASQPCQNGGTCTHGINSFRCQCPAGFGGPTCETAQSPCDTKECQHGGQCQVENGSAVCVCQAGYTGAACEMDVDDCSPDPCLNGGSCVDLVGNYTCLCAEPFKGLRCETGDHPVPDACLSAPCHNGGTCVDADQGYVCECPEGFMGLDCRERVPDDCECRNGGRCLGANTTLCQCPLGFFGLLCEFEITAMPCNMNTQCPDGGYCMEHGGSYLCVCHTDHNASHSLPSPCDSDPCFNGGSCDAHDDSYTCECPRGFHGKHCEKARPHLCSSGPCRNGGTCKEAGGEYHCSCPYRFTGRHCEIGKPDSCASGPCHNGGTCFHYIGKYKCDCPPGFSGRHCEIAPSPCFRSPCVNGGTCEDRDTDFFCHCQAGYMGRRCQAEVDCGPPEEVKHATLRFNGTRLGAVALYACDRGYSLSAPSRIRVCQPHGVWSEPPQCLEIDECRSQPCLHGGSCQDRVAGYLCLCSTGYEGAHCELERDECRAHPCRNGGSCRNLPGAYVCRCPAGFVGVHCETEVDACDSSPCQHGGRCESGGGAYLCVCPESFFGYHCETVSDPCFSSPCGGRGYCLASNGSHSCTCKVGYTGEDCAKELFPPTALKMERVEESGVSISWNPPNGPAARQMLDGYAVTYVSSDGSYRRTDFVDRTRSSHQLQALAAGRAYNISVFSVKRNSNNKNDISRPAVLLARTRPRPVEGFEVTNVTASTISVQWALHRIRHATVSGVRVSIRHPEALRDQATDVDRSVDRFTFRALLPGKRYTIQLTTLSGLRGEEHPTESLATAPTHVWTRPLPPANLTAARVTATSAHVVWDAPTPGSLLEAYVINVTTSQSTKSRYVPNGKLASYTVRDLLPGRRYQLSVIAVQSTELGPQHSEPAHLYIITSPRDGADRRWHQGGHHPRVLKNRPPPARLPELRLLNDHSAPETPTQPPRFSELVDGRGRVSARFGGSPSKAATVRSHVPGNCSENPCQNGGTCVPGADAHSCDCGPGFKGRRCELACIKVSRPCTRLFSETKAFPVWEGGVCHHVKQSKSQTLEKS

SEQ ID NO: 12623 - protein, 66 aa, Homo Sapiens
QCQVENGSAVCVCQAGYTGAACEMDVDDCSPDPCLNGGSCVDLVGNYTCLCAEPFKGLRCETVVTC

SEQ ID NO: 12624 - protein, 272 aa, Homo Sapiens
  misc_feature (1)..(1): Xaa can be any naturally occurring amino acid
XPTCETAQSPCDTKECQHGGQCQVENGSAVCVCQAGYTGAACEMDVDDCSPDPCLNGGSCVDLVGNYTCLCAEPFKGLRCETGDHPVPDACLSAPCHNGGTCVDADQGYVCECPEGFMGLDCRERVPDDCECRNGGRCLGANTTLCQCPLGFFGLLCEFEITAMPCNMNTQCPDGGYCMEHGGSYLCVCHTDHNASHSLPSPCDSDPCFNGGSCDAHDDSYTCECPRGFHGKHCEKGMAGRGVRAGVSTLESARGPPSCFSAVSLLVSRIAD

SEQ ID NO: 12625 - protein, 300 aa, Homo Sapiens
  misc_feature (1)..(1): Xaa can be any naturally occurring amino acid
XSLPHVSDVNECASQPCQNGGTCTHGINSFRCQCPAGFGGPTCETAQSPCDTKECQHGGQCQVENGSAVCVCQAGYTGAACEMDVDDCSPDPCLNGGSCVDLVGNYTCLCAEPFKGLRCETGDHPVPDACLSAPCHNGGTCVDADQGYVCECPEGFMGLDCRERVPDDCECRNGGRCLGANTTLCQCPLGFFGLLCEFEITAMPCNMNTQCPDGGYCMEHGGSYLCVCHTDHNASHSLPSPCDSDPCFNGGSCDAHDDSYTCECPRGFHGKHCEKARPHLCSSGPCRNGGTCKEAGGEYH

SEQ ID NO: 12626 - protein, 28 aa, Homo Sapiens
MAVAAAAAAAGPAGAGGGRAQRSGLLEV

SEQ ID NO: 12627 - protein, 538 aa, Homo Sapiens [sequence omitted]

SEQ ID NO: 12628 - protein, 538 aa, Homo Sapiens [sequence omitted]

SEQ ID NO: 12629 - protein, 540 aa, Homo Sapiens
MRVAAATAAAGAGPAMAVWTRATKAGLVELLLRERWVRVVAELSGESLSLTGDAAAAELEPALGPAAAAFNGLPNGGGAGDSLPGSPSRGLGPPSPPAPPRGPAGEAGASPPVRRVRVVKQEAGGLGISIKGGRENRMPILISKIFPGLAADQSRALRLGDAILSVNGTDLRQATHDQAVQALKRAGKEVLLEVKFIREVTPYIKKPSLVSDLPWEGAAPQSPSFSGSEDSGSPKHQNSTKDRKIIPLKMCFAARNLSMPDLENRLIELHSPDSRNTLILRCKDTATAHSWFVAIHTNIMALLPQVLAELNAMLGATSTAGGSKEVKHIAWLAEQAKLDGGRQQWRPVLMAVTEKDLLLYDCMPWTRDAWASPCHSYPLVATRLVHSGSGCRSPSLGSDLTFATRTGSRQGIEMHLFRVETHRDLSSWTRILVQGCHAAAELIKEVSLGCMLNGQEVRLTIHYENGFTISRENGGSSSILYRYPFERLKMSADDGIRNLYLDFGGPEGELTMDLHSCPKPIVFVLHTFLSAKVTRMGLLV

SEQ ID NO: 12630 - protein, 267 aa, Homo Sapiens
MRVAAATAAAGAGPAMAVWTRATKAGLVELLLRERWVRVVAELSGESLSLTGDAAAAELEPALGPAAAAFNGLPNGGGAGDSLPGSPSRGLGPPSPPAPPRGPAGEAGASPPVRRVRVVKQEAGGLGISIKGGRENRMPILISKIFPGLAADQSRALRLGDAILSVNGTDLRQATHDQAVQALKRAGKEVLLEVKFIREVTPYIKKPSLVSDLPWEGAAPQSPSFSGSEDSGSPKHQNSTKDRKIIPLKMCFAARNLSMPDLENRQN

SEQ ID NO: 12631 - protein, 64 aa, Homo Sapiens
  misc_feature (1)..(1): Xaa can be any naturally occurring amino acid
XGRENRMPILISKIFPGLAADQSRALRLGDAILSVNGTDLRQATHDQAVQALKRAGKEVLLEGL

SEQ ID NO: 12632 - protein, 162 aa, Homo Sapiens
  misc_feature (1)..(1): Xaa can be any naturally occurring amino acid
XGRENRMPILISKIFPGLAADQSRALRLGDAILSVNGTDLRQATHDQAVQALKRAGKEVLLEVKFIREVTPYIKKPSLVSDLPWEGAAPQSPSFSGSEDSGSPKHQNSTKDRKIIPLKMCFAARNLSMPDLENRLIELHSPDSRNTLILRCKDTATAHSWQN

SEQ ID NO: 12633 - protein, 139 aa, Homo Sapiens
  misc_feature (1)..(1): Xaa can be any naturally occurring amino acid
XPHLQDLPRAGCRPEPGAAAGRRHPVGERHRPAPGHPRPGRAGAEARGQGVKFIREVTPYIKKPSLVSDLPWEGAAPQSPSFSGSEDSGSPKHQNSTKDRKIIPLKMCFAARNLSMPDLENRLIELHSPDSRNTLILRC

SEQ ID NO: 12634 - protein, 212 aa, Homo Sapiens
DAQLPSKRIIGPKNYEFLKSKREEFQEYLQKLLQHPELSNSQLLADFLSPNGGETQFLDKILPDVNLGKIIKSVPGKLMKEKGQHLEPFIMNFINSCESPKPKPSRPELTILSPTSENNKKLFNDLFKNNANRAENTERKQNQNYFMEVMTVEGVYDYLMYVDAIFCENTEPRSLQDKQKGAKQTFEEMMNYIPDLLVKCIGEETKYESIRL

SEQ ID NO: 12635 - protein, 91 aa, Homo Sapiens
MIFWSFVAGVVTFYCSLGPDSLLPNIFFTIKYKPKQLGLQELFPQGHSCAVCGKVKCKRHRPSLLLENYQPWLDLKISSKVDASLSEGCDR

SEQ ID NO: 12636 - protein, 145 aa, Homo Sapiens
MIFWSFVAGVVTFYCSLGPDSLLPNIFFTIKYKPKQLGLQELFPQGHSCAVCGKVKCKRHRPSLLLENYQPWLDLKISSKVDASLSEVDIPSIITKKLLKAAMKHIEVIVKARQKVKNTEFLQQAALEEYGPELHVALRSRRDEL

SEQ ID NO: 12637 - protein, 894 aa, Homo Sapiens
MIFWSFVAGVVTFYCSLGPDSLLPNIFFTIKYKPKQLGLQELFPQGHSCAVCGKVKCKRHRPSLLLENYQPWLDLKISSKVDASLSEVLELVLENFVYPWYRDVTDDESFVDELRITLRFFASVLIRRIHKVDIPSIITKKLLKAAMKHIEVIVKARQKVKNTEFLQQAALEEYGPELHVALRSRRDELHYLRKLTELLFPYILPPKATDCRSLTLLIREILSGSVFLPSLDFLADPDTVNHLLIIFIDDSPPEKATEPASPLVPFLQKFAEPRNKKPSVLKLELKQIREQQDLLFRFMNFLKQEGAVHVLQFCLTVEEFNDRILRPELSNDEMLSLHEELQKIYKTYCLDESIDKIRFDPFIVEEIQRIAEGPYIDVVKLQTMRCLFEAYEHVLSLLENVFTPMFCHSDEYFRQLLRGAESPTRNSKLNRGSLSLDDFRNTQKRGESFGISRIGSKIKGVFKSTTMEGAMLPNYGVAEGEDDFIEEGIVVMEDDSPVEAVSTPNTPRNLAAWKISIPYVDFFEDPSSERKEKKERIPVFCIDVERNDRRAVGHEPEHWSVYRRYLEFYVLESKLTEFHGAFPDAQLPSKRIIGPKNYEFLKSKREEFQEYLQKLLQHPELSNSQLLADFLSPNGGETQFLDKILPDVNLGKIIKSVPGKLMKEKGQHLEPFIMNFINSCESPKPKPSRPELTILSPTSENNKKLFNDLFKNNANRAENTERKQNQNYFMEVMTVEGVYDYLMYVGRVVFQVPDWLHHLLMGTRILFKNTLEMYTDYYLQCKLEQLFQEHRLVSLITLLRDAIFCENTEPRSLQDKQKGAKQTFEEMMNYIPDLLVKCIGEETKYESIRLLFDGLQQPVLNKQLTYVLLDIVIQELFPELNKVQKEVTSVTSWM

SEQ ID NO: 12638 - protein, 833 aa, Homo Sapiens
MKMKTFVIIHFHLIQLGLQELFPQGHSCAVCGKVKCKRHRPSLLLENYQPWLDLKISSKVDASLSEVLELVLENFVYPWYRDVTDDESFVDELRITLRFFASVLIRRIHKVDIPSIITKKLLKAAMKHIEVIVKARQKVKNTEFLQQAALEEYGPELHVALRSRRDELHYLRKLTELLFPYILPPKATDCRSLTLLIREILSGSVFLPSLDFLADPDTVNHLLIIFIDDSPPEKATEPASPLVPFLQKFAEPRNKKPSVLKLELKQIREQQDLLFRFMNFLKQEGAVHVLQFCLTVEEFNDRILRPELSNDEMLSLHEELQKIYKTYCLDESIDKIRFDPFIVEEIQRIAEGPYIDVVKLQTMRCLFEAYEHVLSLLENVFTPMFCHSDEYFRQLLRGAESPTRNSKLNRNTQKRGESFGISRIGSKIKGVFKSTTMEGAMLPNYGVAEGEDDFIEEGIVVMEDDSPVEAVSTPNTPRNLAAWKISIPYVDFFEDPSSERKEKKERIPVFCIDVERNDRRAVGHEPEHWSVYRRYLEFYVLESKLTEFHGAFPDAQLPSKRIIGPKNYEFLKSKREEFQEYLQKLLQHPELSNSQLLADFLSPNGGETQFLDKILPDVNLGKIIKSVPGKLMKEKGQHLEPFIMNFINSCESPKPKPSRPELTILSPTSENNKKLFNDLFKNNANRAENTERKQNQNYFMEVMTVEGVYDYLMYVGRVVFQVPDWLHHLLMGTRILFKNTLEMYTDYYLQCKLEQLFQEHRLVSLITLLRDAIFCENTEPRSLQDKQKGAKQTFEEMMNYIPDLLVKCIGEETKYESIRLLFDGLQQPVLNKQ

SEQ ID NO: 12639 - protein, 236 aa, Homo Sapiens
MVPWVRTMGQKLKQRLRLDVGREICRQYPLFCFLLLCLSAASLLLNRYIHILMIFWSFVAGVVTFYCSLGPDSLLPNIFFTIKYKPKLGLQELFPQGHSCAVCGKVKCKRHRPSLLLENYQPWLDLKISSKVDASLSEVLELVLENFVYPWYRDVTDDESFVDELRITLRFFASVLIRRIHKVDIPSIITKKLLKAAMKHIEVIVKARQKVKNTEFLQQAALEEYGPELHVALRSR

SEQ ID NO: 12640 - protein, 893 aa, Homo Sapiens
MVPWVRTMGQKLKQRLRLDVGREICRQYPLFCFLLLCLSAASLLLNRYIHILMIFWSFVAGVVTFYCSLGPDSLLPNIFFTIKYKPKQLGLQELFPQGHSCAVCGKVKCKRHRPSLLLENYQPWLDLKISSKVDASLSEVDIPSIITKKLLKAAMKHIEVIVKARQKVKNTEFLQQAALEEYGPELHVALRSRRDELHYLRKLTELLFPYILPPKATDCRSLTLLIREILSGSVFLPSLDFLADPDTVNHLLIIFIDDSPPEKATEPASPLVPFLQKFAEPRNKKPSVLKLELKQIREQQDLLFRFMNFLKQEGAVHVLQFCLTVEEFNDRILRPELSNDEMLSLHEELQKIYKTYCLDESIDKIRFDPFIVEEIQRIAEGPYIDVVKLQTMRCLFEAYEHVLSLLENVFTPMFCHSDEYFRQLLRGAESPTRNSKLNRNTQKRGESFGISRIGSKIKGVFKSTTMEGAMLPNYGVAEGEDDFIEEGIVVMEDDSPVEAVSTPNTPRNLAAWKISIPYVDFFEDPSSERKEKKERIPVFCIDVERNDRRAVGHEPEHWSVYRRYLEFYVLESKLTEFHGAFPDAQLPSKRIIGPKNYEFLKSKREEFQEYLQKLLQHPELSNSQLLADFLSPNGGETQFLDKILPDVNLGKIIKSVPGKLMKEKGQHLEPFIMNFINSCESPKPKPSRPELTILSPTSENNKKLFNDLFKNNANRAENTERKQNQNYFMEVMTVEGVYDYLMYVGRVVFQVPDWLHHLLMGTRILFKNTLEMYTDYYLQCKLEQLFQEHRLVSLITLLRDAIFCENTEPRSLQDKQKGAKQTFEEMMNYIPDLLVKCIGEETKYESIRLLFDGLQQPVLNKQLTYVLLDIVIQELFPELNKVQKEVTSVTSWM

SEQ ID NO: 12641 - protein, 183 aa, Homo Sapiens
MVPWVRTMGQKLKQRLRLDVGREICRQYPLFCFLLLCLSAASLLLNRYIHILMIFWSFVAGVVTFYCSLGPDSLLPNIFFTIKYKPKQLGLQELFPQGHSCAVCGKVKCKRHRPSLLLENYQPWLDLKISSKVDASLSEVLELVLENFVYPWYRDVTDDESFVDELRITLRFFASVLIRRIHK

SEQ ID NO: 12642 - protein, 946 aa, Homo Sapiens
MVPWVRTMGQKLKQRLRLDVGREICRQYPLFCFLLLCLSAASLLLNRYIHILMIFWSFVAGVVTFYCSLGPDSLLPNIFFTIKYKPKQLGLQELFPQGHSCAVCGKVKCKRHRPSLLLENYQPWLDLKISSKVDASLSEVLELVLENFVYPWYRDVTDDESFVDELRITLRFFASVLIRRIHKVDIPSIITKKLLKAAMKHIEVIVKARQKVKNTEFLQQAALEEYGPELHVALRSRRDELHYLRKLTELLFPYILPPKATDCRSLTLLIREILSGSVFLPSLDFLADPDTVNHLLIIFIDDSPPEKATEPASPLVPFLQKFAEPRNKKPSVLKLELKQIREQQDLLFRFMNFLKQEGAVHVLQFCLTVEEFNDRILRPELSNDEMLSLHEELQKIYKTYCLDESIDKIRFDPFIVEEIQRIAEGPYIDVVKLQTMRCLFEAYEHVLSLLENVFTPMFCHSDEYFRQLLRGAESPTRNSKLNRGSLSLDDFRNTQKRGESFGISRIGSKIKGVFKSTTMEGAMLPNYGVAEGEDDFIEEGIVVMEDDSPVEAVSTPNTPRNLAAWKISIPYVDFFEDPSSERKEKKERIPVFCIDVERNDRRAVGHEPEHWSVYRRYLEFYVLESKLTEFHGAFPDAQLPSKRIIGPKNYEFLKSKREEFQEYLQKLLQHPELSNSQLLADFLSPNGGETQFLDKILPDVNLGKIIKSVPGKLMKEKGQHLEPFIMNFINSCESPKPKPSRPELTILSPTSENNKKLFNDLFKNNANRAENTERKQNQNYFMEVMTVEGVYDYLMYVGRVVFQVPDWLHHLLMGTRILFKNTLEMYTDYYLQCKLEQLFQEHRLVSLITLLRDAIFCENTEPRSLQDKQKGAKQTFEEMMNYIPDLLVKCIGEETKYESIRLLFDGLQQPVLNKQLTYVLLDIVIQELFPELNKVQKEVTSVTSWM

SEQ ID NO: 12643 - protein, 937 aa, Homo Sapiens
MVPWVRTMGQKLKQRLRLDVGREICRQYPLFCFLLLCLSAASLLLNRYIHILMIFWSFVAGVVTFYCSLGPDSLLPNIFFTIKYKPKQLGLQELFPQGHSCAVCGKVKCKRHRPSLLLENYQPWLDLKISSKVDASLSEVLELVLENFVYPWYRDVTDDESFVDELRITLRFFASVLIRRIHKVDIPSIITKKLLKAAMKHIEVIVKARQKVKNTEFLQQAALEEYGPELHVALRSRRDELHYLRKLTELLFPYILPPKATDCRSLTLLIREILSGSVFLPSLDFLADPDTVNHLLIIFIDDSPPEKATEPASPLVPFLQKFAEPRNKKPSVLKLELKQIREQQDLLFRFMNFLKQEGAVHVLQFCLTVEEFNDRILRPELSNDEMLSLHEELQKIYKTYCLDESIDKIRFDPFIVEEIQRIAEGPYIDVVKLQTMRCLFEAYEHVLSLLENVFTPMFCHSDEYFRQLLRGAESPTRNSKLNRNTQKRGESFGISRIGSKIKGVFKSTTMEGAMLPNYGVAEGEDDFIEEGIVVMEDDSPVEAVSTPNTPRNLAAWKISIPYVDFFEDPSSERKEKKERIPVFCIDVERNDRRAVGHEPEHWSVYRRYLEFYVLESKLTEFHGAFPDAQLPSKRIIGPKNYEFLKSKREEFQEYLQKLLQHPELSNSQLLADFLSPNGGETQFLDKILPDVNLGKIIKSVPGKLMKEKGQHLEPFIMNFINSCESPKPKPSRPELTILSPTSENNKKLFNDLFKNNANRAENTERKQNQNYFMEVMTVEGVYDYLMYVGRVVFQVPDWLHHLLMGTRILFKNTLEMYTDYYLQCKLEQLFQEHRLVSLITLLRDAIFCENTEPRSLQDKQKGAKQTFEEMMNYIPDLLVKCIGEETKYESIRLLFDGLQQPVLNKQLTYVLLDIVIQELFPELNKVQKEVTSVTSWM

SEQ ID NO: 12644 - protein, 665 aa, Homo Sapiens
MVPWVRTMGQKLKQRLRLDVGREICRQYPLFCFLLLCLSAASLLLNRYIHILMIFWSFVAGVVTFYCSLGPDSLLPNIFFTIKYKPKQLGLQELFPQGHSCAVCGKVKCKRHRPSLLLENYQPWLDLKISSKVDASLSEVLELVLENFVYPWYRDVTDDESFVDELRITLRFFASVLIRRIHKVDIPSIITKKLLKAAMKHIEVIVKARQKVKNTEFLQQAALEEYGPELHVALRSRRDELHYLRKLTELLFPYILPPKATDCRSLTLLIREILSGSVFLPSLDFLADPDTVNHLLIIFIDDSPPEKATEPASPLVPFLQKFAEPRNKKPSVLKLELKQIREQQDLLFRFMNFLKQEGAVHVLQFCLTVEEFNDRILRPELSNDEMLSLHEELQKIYKTYCLDESIDKIRFDPFIVEEIQRRKIIKSVPGKLMKEKGQHLEPFIMNFINSCESPKPKPSRPELTILSPTSENNKKLFNDLFKNNANRAENTERKQNQNYFMEVMTVEGVYDYLMYVGRVVFQVPDWLHHLLMGTRILFKNTLEMYTDYYLQCKLEQLFQEHRLVSLITLLRDAIFCENTEPRSLQDKQKGAKQTFEEMMNYIPDLLVKCIGEETKYESIRLLFDGLQQPVLNKQLTYVLLDIVIQELFPELNKVQKEVTSVTSWM

SEQ ID NO: 12645 - protein, 178 aa, Homo Sapiens
  misc_feature (1)..(1): Xaa can be any naturally occurring amino acid
XKNNANRAENTERKQNQNYFMEVMTVEGVYDYLMYVGRVVFQVPDWLHHLLMGTRILFKNTLEMYTDYYLQCKLEQLFQEHRLVSLITLLRDAIFCENTEPRSLQDKQKGAKQTFEEMMNYIPDLLVKCIGEETKYESIRLLFDGLQQPVLNKQLTYVLLDIVIQELFPELNKVTEKQ

SEQ ID NO: 12646 - protein, 54 aa, Homo Sapiens
MLALLCSCLLLAAGASDAWTGEDSAEPNSDSAEWIRDMYAKVTEIWQEVMQRRD

SEQ ID NO: 12647 - protein, 240 aa, Homo Sapiens
MLALLCSCLLLAAGASDAWTGEDSAEPNSDSAEWIRDMYAKVTEIWQEVMQRRDDDGALHAACQVQPSATLDAAQPRVTGVVLFRQLAPRAKLDAFFALEGFPTEPNSSSRAIHVHQFGDLSQGCESTGPHYNPLAVPHPQHPGDFGNFAVRDGSLWRYRAGLAASLAGPHSIVGRAVVVHAGEDDLGRGGNQASVENGNAGRRLACCVVGVCGPGLWERQAREHSERKKRRRESECKAA

SEQ ID NO: 12648 - protein, 213 aa, Homo Sapiens
MQLPLALCLVCLLVHTAFRVVEGQGWQAFKNDATEIIPELGEYPEPPPELENNKTMNRAENGGRPPHHPFETKDVSEYSCRELHFTRYVTDGPCRSAKPVTELVCSGQCGPARLLPNAIGRGKWWRPSGPDFRCIPDRYRAQRVQLLCPGGEAPRARKVRLVASCKCKRLTRFHNQSELKDFGTEAARPQKGRKPRPRARSAKANQAELENAY

SEQ ID NO: 12649 - protein, 230 aa, Homo Sapiens
MLPPAIHFYLLPLACILMKSCLAFKNDATEILYSHVVKPVPAHPSSNSTLNQARNGGRHFSNTGLDRNRTESLTRQNYFWLFPGAFLRQLQEARVQVGCRELRSTKYISDGQCTSISPLKELVCAGECLPLPVLPNWIGGGYGTKYWSRRSSQEWRCVNDKTRTQRIQLQCQDGSTRTYKITVVTACKCKRYTRQHNESSHNFESMSPAKPVQHHRERKRASKSSKHSMS

SEQ ID NO: 12650 - protein, 206 aa, Homo Sapiens
MLPPAIHFYLLPLACILMKSCLAFKNDATEILYSHVVKPVPAHPSSNSTLNQARNGGRHFSNTGLDRNTRVQVGCRELRSTKYISDGQCTSISPLKELVCAGECLPLPVLPNWIGGGYGTKYWSRRSSQEWRCVNDKTRTQRIQLQCQDGSTRTYKITVVTACKCKRYTRQHNESSHNFESMSPAKPVQHHRERKRASKSSKHSMS

SEQ ID NO: 12651 - protein, 549 aa, Homo Sapiens
MALAAAAAAAAAGVSQAAVLGFLQEHGGKVRNSELLSRFKPLLDAGDPRGRAARRDRFKQFVNNVAVVKELDGVKFVVLRKKPRPPEPEPAPFGPPGAAAQPSKPTSTVLPRSASAPGAPPLVRVPRPVEPPGDLGLPTEPQDTPGGPASEPAQPPGERSADPPLPALELAQATERPSADAAPPPRAPSEAASPCSDPPDAEPGPGAAKGPPQQKPCMLPVRCVPAPATLRLRAEEPGLRRQLSEEPSPRSSPLLLRRLSVEESGLGLGLGPGRSPHLRRLSRAGPRLLSPDAEELPAAPPPSAVPLEPSEHEWLVRTAGGRWTHQLHGLLLRDRGLAAKRDFMSGFTALHWAAKSGDGEMALQLVEVARRSGAPVDVNARSHGGYTPLHLAALHGHEDAAVLLVVRLGAQVHVRDHSGRRAYQYLRPGSSYALRRLLGDPGLRGTTEPDATGGGSGSLAARRPVQVAATILSSTTSAFLGVLADDLMLQDLARGLKKSSSFSKFLSASPMAPRKKTKIRGGLPAFSEISRRPTPGPLAGLVPSLPPTT

SEQ ID NO: 12652 - protein, 146 aa, Homo Sapiens
MLLALVCLLSCLLPSSEAKLYGRCELARVLHDFGLDGYRGYSLADWVCLAYFTSGFNAAALDYEADGSTNNGIFQINSRRWCSNLTPNVPNVCRMYCSDLLNPNLKDTVICAMKITQEPQGLGYWEAWRHHCQGKDLTEWVDGCDF

SEQ ID NO: 12653 - protein, 112 aa, Homo Sapiens
MVSALRGAPLIRVCLAYFTSGFNAAALDYEADGSTNNGIFQINSRRWCSNLTPNVPNVCRMYCSDLLNPNLKDTVICAMKITQEPQGLGYWEAWRHHCQGKDLTEWVDGCDF

SEQ ID NO: 12654 - protein, 215 aa, Homo Sapiens [sequence omitted]

SEQ ID NO: 12655 - protein, 124 aa, Homo Sapiens
MVLCWLLLLVMALPPGTTGVKDCVFCELTDSMQCPGTYMHCGDDEDCFTGHGVAPGTGPVINKGCLRATSCGLEEPVSYRGVTYSLTTNCCTGRLCNRAPSSQTVGATTSLALGLGMLLPPRLL

SEQ ID NO: 12656 - protein, 159 aa, Homo Sapiens
MKAWGTVVVTLATLMVVTVDAKIYERCELAARLERAGLNGYKGYGVGDWLCMAHYESGFDTAFVDHNPDGSSEYGIFQLNSAWWCDNGITPTKNLCHMDCHDLLNRHILDDIRCAKQIVSSQNGLSAWTSWRLHCSGHDLSEWLKGCDMHVKIDPKIHP

SEQ ID NO: 12657 - protein, 159 aa, Homo Sapiens; identical to SEQ ID NO: 12656

SEQ ID NO: 12658 - protein, 159 aa, Homo Sapiens; identical to SEQ ID NO: 12656

SEQ ID NO: 12659 - protein, 195 aa, Homo Sapiens
MAVSQGDGTLCFVLLLCCWQETELRPRTVIPGSPTEIPFSSKQEDMSELLDEILVQEILDLNKTTPSEMPSTASTLSTPLHAGIDENYQAGGSENYHELLENLQFSPGIEVKISNDEANANANLHGDPSENYRGPQVSPGSEKSVSSKEKNSKNTQYENLSILDQILQNIGRSSGNIFHKEQQRTSAQRRSQGSQ

SEQ ID NO: 12660 - protein, 164 aa, Homo Sapiens
MLWLLPTDRGRSGNGNEPQDEILVQEILDLNKTTPSEMPSTASTLSTPLHAGIDENYQAGGSENYHELLENLQFSPGIEVKISNDEANANANLHGDPSENYRGPQVSPGSEKSVSSKEKNSKNTQYENLSILDQILQNIGRSSGNIFHKEQQRTSAQRRSQGSQ

SEQ ID NO: 12661 - protein, 104 aa, Homo Sapiens
MLWLLPTDRGRSGNGNEPQGSPTEIPFSSKQEDMSELLDEILVQEILDLNKTTPSEMPSTASTLSTPLHAGIDENYQAGGSENYHELLENLQFSPGIEVKISND

SEQ ID NO: 12662 - protein, 112 aa, Homo Sapiens
MTFFTHLWDGDPVSQVAGSPTEIPFSSKQEDMSELLDEILVQEILDLNKTTPSEMPSTASTLSTPLHAGIDENYQAGGSENYHELLENLQFSPGIEVKISNDEANANANLHG

SEQ ID NO: 12663 - protein, 80 aa, Homo Sapiens
MKVFFLFAVLFCLVQTNSGDVPLGIRNTICRMQQGICRLFFCHSGEKKRDISSDPWNRCCVSNTDEEGKEKPEMDGRSGI

SEQ ID NO: 12664 - protein, 50 aa, Homo Sapiens
MKVFFLFAVLFCLVQTNSVHISHQEARGPSFKICVGFLGPRWARGCSTGN

SEQ ID NO: 12665 - protein, 113 aa, Homo Sapiens
MRQRLLPSVTSLLLVALLFPGSSQARHVNHSATEALGELRERAPGQGTNGFQLLRHAVKRDLLPPRTPPYQEPASDLKVVDCRRSEGFCQEYCNYMETQVGYCSKKKDACCLH

SEQ ID NO: 12666 - protein, 133 aa, Homo Sapiens
MRQRLLPSVTSLLLVALLFPGSSQARHVNHSATEALGELRERAPGQGTNGFQLLRHAVKRDLLPPRTPPYQGDVPLGIRNTICRMQQGICRLFFCHSGEKKRDISSDPWNRCCVSNTDEEGKEKPEMDGRSGI

SEQ ID NO: 12667 - protein, 108 aa, Homo Sapiens
MRQRLLPSVTSLLLVALLFPGSSQARHVNHSATEALGELRERAPGQGTNGFQLLRHAVKRDLLPPRTPPYQGDVPLGIRNTICRMQQGICRLFFCHSGTGQQHRQRCG

SEQ ID NO: 12668 - protein, 82 aa, Homo Sapiens
MRQRLLPSVTSLLLVALLFPGSSQARHVNHSATEALGELRERAPGQGTNGFQLLRHAVKRDLLPPRTPPYQGTGQQHRQRCG

SEQ ID NO: 12669 - protein, 103 aa, Homo Sapiens
MRQRLLPSVTSLLLVALLFPGSSQARHVNHSATEALGELRERAPGQGTNGFQLLRHAVKRDLLPPRTPPYQVHISHQEARGPSFKICVGFLGPRWARGCSTGN

SEQ ID NO: 12670 - protein, 53 aa, Homo Sapiens
SSQARHVNHSATEALGELRERAPGQGTNGFQLLRHAVKRDLLPPRTPPYQEMK

SEQ ID NO: 12671 - protein, 106 aa, Homo Sapiens
  misc_feature (1)..(1): Xaa can be any naturally occurring amino acid
XFPGSSQARHVNHSATEALGELRERAPGQGTNGFQLLRHAVKRDLLPPRTPPYQGTHSVAQAGVQWHCYRLLQPLPPGLKCSSHLSLPNTWDHRHAPLHTASFFRC

SEQ ID NO: 12672 - protein, 106 aa, Homo Sapiens
LFPGSSQARHVNHSATEALGELRERAPGQGTNGFQLLRHAVKRDLLPPRTPPYQGTHSVAQAGVQWHCYRLLQPLPPGLKCSSHLSLPNTWDHRHAPLHTASFFRC

SEQ ID NO: 12673 - protein, 80 aa, Homo Sapiens
MKVFFLFAVLFCLVQTNSGDVPPGIRNTICHMQQGICRLFFCHSGEKKRDICSDPWNRCCVSNTDEEGKEKPEMDGRSGI

SEQ ID NO: 12674 - protein, 50 aa, Homo Sapiens
MKVFFLFAVLFCLVQTNSVHISHREARGPSFRICVDFLGPRWARGCSTGN

SEQ ID NO: 12675 - protein, 113 aa, Homo Sapiens; identical to SEQ ID NO: 12665

SEQ ID NO: 12676 - protein, 133 aa, Homo Sapiens
MRQRLLPSVTSLLLVALLFPGSSQARHVNHSATEALGELRERAPGQGTNGFQLLRHAVKRDLLPPRTPPYQGDVPPGIRNTICHMQQGICRLFFCHSGEKKRDICSDPWNRCCVSNTDEEGKEKPEMDGRSGI

SEQ ID NO: 12677 - protein, 108 aa, Homo Sapiens
MRQRLLPSVTSLLLVALLFPGSSQARHVNHSATEALGELRERAPGQGTNGFQLLRHAVKRDLLPPRTPPYQGDVPPGIRNTICHMQQGICRLFFCHSGTGQQHRQRCG

SEQ ID NO: 12678 - protein, 82 aa, Homo Sapiens; identical to SEQ ID NO: 12668

SEQ ID NO: 12679 - protein, 103 aa, Homo Sapiens
MRQRLLPSVTSLLLVALLFPGSSQARHVNHSATEALGELRERAPGQGTNGFQLLRHAVKRDLLPPRTPPYQVHISHREARGPSFRICVDFLGPRWARGCSTGN

SEQ ID NO: 12680 - protein, 53 aa, Homo Sapiens; identical to SEQ ID NO: 12670

SEQ ID NO: 12681 - protein, 115 aa, Homo Sapiens
MCVCQDPTSCPAPIGEFEKVCSNDNKTFDSSCHFFATKCTLEGTKKGHKLHLDYIGPCKYIPPCLDSELTEFPLRMRDWLKNVLVTLYERDEDNNLLTEKQKLRVKKIHENEKRL

SEQ ID NO: 12682 - protein, 149 aa, Homo Sapiens
MCVCQDPTSCPAPIGEFEKVCSNDNKTFDSSCHFFATKCTLEGTKKGHKLHLDYIGPCKYIPPCLDSELTEFPLRMRDWLKNVLVTLYERDEDNNLLTEKQKLRVKKIHENEKRLEAGDHPVELLARDFEKNYNMYIFPVHWQFGQLDQ

SEQ ID NO: 12683 - protein, 53 aa, Homo Sapiens
MRAWIFFLLCLAGRALAAPQQEALPDETEVVEETVAEVTEVSVGANPVQVEVG

SEQ ID NO: 12684 - protein, 111 aa, Homo Sapiens
MRAWIFFLLCLAGRALAAPQQEALPDETEVVEETVAEVTEVSVGANPVQVEVGEFDDGAEETEEEVVAENPCQNHHCKHGKVCELDENNTPMCVCQDPTSCPAPIGEFEKV

SEQ ID NO: 12685 - protein, 303 aa, Homo Sapiens
MRAWIFFLLCLAGRALAAPQQEALPDETEVVEETVAEVTEVSVGANPVQVEVGEFDDGAEETEEEVVAENPCQNHHCKHGKVCELDENNTPMCVCQDPTSCPAPIGEFEKVCSNDNKTFDSSCHFFATKCTLEGTKKGHKLHLDYIGPCKYIPPCLDSELTEFPLRMRDWLKNVLVTLYERDEDNNLLTEKQKLRVKKIHENEKRLEAGDHPVELLARDFEKNYNMYIFPVHWQFGQLDQHPIDGYLSHTELAPLRAPLIPMEHCTTRFFETCDLDNDKYIALDEWAGCFGIKQKDIDKDLVI

SEQ ID NO: 12686 - protein, 56 aa, Homo Sapiens
MKTGLFFLCLLGTAAAIPTNARLLSDHSKPTAETVAPDNTAIPSLRAEAEENEKET

SEQ ID NO: 12687 - protein, 89 aa, Homo Sapiens
MKTGLFFLCLLGTAAAIPTNARLLSDHSKPTAETVAPDNTAIPSLRAEAEENEKETAVSTEDDSHHKAEKSSVLKSKEESHEQSAEQGK

SEQ ID NO: 12688 - protein, 120 aa, Homo Sapiens
MKTGLFFLCLLGTAAAIPTNARLLSDHSKPTAETVAPDNTAIPSLRAEAEENEKETAVSTEDDSHHKAEKSSVLKSKEESHEQSAEQGKSSSQELGLKDQEDSDGHLSVNLEYAPTEGTL

SEQ ID NO: 12689 - protein, 127 aa, Homo Sapiens
MKTGLFFLCLLGTAAAIPTNARLLSDHSKPTAETVAPDNTAIPSLRAEAEENEKETAVSTEDDSHHKAEKSSVLKSKEESHEQSAEQGKSSSQELGLKDQEDSDGHLSVNLEYAPTEGTLDIKEDMS

SEQ ID NO: 12690 - protein, 141 aa, Homo Sapiens
MKTGLFFLCLLGTAAAIPTNARLLSDHSKPTAETVAPDNTAIPSLRAEAEENEKETAVSTEDDSHHKAEKSSVLKSKEESHEQSAEQGKSSSQELGLKDQEDSDGHLSVNLEYAPTEGTLDIKEDMSEPQEKKLSENTDFL

SEQ ID NO: 12691 - protein, 144 aa, Homo Sapiens
MKTGLFFLCLLGTAAAIPTNARLLSDHSKPTAETVAPDNTAIPSLRAEAEENEKETAVSTEDDSHHKAEKSSVLKSKEESHEQSAEQGKSSSQELGLKDQEDSDGHLSVNLEYAPTEGTLDIKEDMSEPQEKKLSENTDFLAPG

SEQ ID NO: 12692 - protein, 664 aa, Homo Sapiens
MKTGLFFLCLLGTAAAIPTNARLLSDHSKPTAETVAPDNTAIPSLRAEAEENEKETAVSTEDDSHHKAEKSSVLKSKEESHEQSAEQGKSSSQELGLKDQEDSDGHLSVNLEYAPTEGTLDIKEDMSEPQEKKLSENTDFLAPGVSSFTDSNQQESITKREENQEQPRNYSHHQLNRSSKHSQGLRDQGNQEQDPNISNGEEEEEKEPGEVGTHNDNQERKTELPREHANSKQEEDNTQSDDILEESDQPTQVSKMQEDEFDQGNQEQEDNSNAEMEEENASNVNKHIQETEWQSQEGKTGLEAISNHKETEEKTVSEALLMEPTDDGNTTPRNHGVDDDGDDDGDDGGTDGPRHSASDDYFIPSQAFLEAERAQSIAYHLKIEEQREKVHENENIGTTEPGEHQEAKKAENSSNEEETSSEGNMRVHAVDSCMSFQCKRGHICKADQQGKPHCVCQDPVTCPPTKPLDQVCGTDNQTYASSCHLFATKCRLEGTKKGHQLQLDYFGACKSIPTCTDFEVIQFPLRMRDWLKNILMQLYEANSEHAGYLNEKQRNKVKKIYLDEKRLLAGDHPIDLLLRDFKKNYHMYVYPVHWQFSELDQHPMDRVLTHSELAPLRASLVPMEHCITRFFEECDPNKDKHITLKEWGHCFGIKEEDIDENLLF

SEQ ID NO: 12693 - protein, 664 aa, Homo Sapiens; identical to SEQ ID NO: 12692

SEQ ID NO: 12694 - protein, 19 aa, Homo Sapiens
MSEPQEKKLSENTDFLAPG

SEQ ID NO: 12695 - protein, 539 aa, Homo Sapiens
MSEPQEKKLSENTDFLAPGVSSFTDSNQQESITKREENQEQPRNYSHHQLNRSSKHSQGLRDQGNQEQDPNISNGEEEEEKEPGEVGTHNDNQERKTELPREHANSKQEEDNTQSDDILEESDQPTQVSKMQEDEFDQGNQEQEDNSNAEMEEENASNVNKHIQETEWQSQEGKTGLEAISNHKETEEKTVSEALLMEPTDDGNTTPRNHGVDDDGDDDGDDGGTDGPRHSASDDYFIPSQAFLEAERAQSIAYHLKIEEQREKVHENENIGTTEPGEHQEAKKAENSSNEEETSSEGNMRVHAVDSCMSFQCKRGHICKADQQGKPHCVCQDPVTCPPTKPLDQVCGTDNQTYASSCHLFATKCRLEGTKKGHQLQLDYFGACKSIPTCTDFEVIQFPLRMRDWLKNILMQLYEANSEHAGYLNEKQRNKVKKIYLDEKRLLAGDHPIDLLLRDFKKNYHMYVYPVHWQFSELDQHPMDRVLTHSELAPLRASLVPMEHCITRFFEECDPNKDKHITLKEWGHCFGIKEEDIDENLLF

SEQ ID NO: 12696 - protein, 802 aa, Homo Sapiens
MLGARAWLGRVLLLPRAGAGLAASRRCPGVWPRTWPHRSPSRGSSSRDKDRSATVSSSVPMPAGGKGSHPSSTPQRVPNRLIHEKSPYLLQHAYNPVDWYPWGQEAFDKARKENKPIFLSVGYSTCHWCHMMEEESFQNEEIGRLLSEDFVSVKVDREERPDVDKVYMTFVQATSSGGGWPMNVWLTPNLQPFVGGTYFPPEDGLTRVGFRTVLLRIREQWKQNKNTLLENSQRVTTALLARSEISVGDRQLPPSAATVNNRCFQQLDEGYDEEYGGFAEAPKFPTPVILSFLFSYWLSHRLTQDGSRAQQMALHTLKMMANGGIRDHVGQGFHRYSTDRQWHVPHFEKMLYDQAQLAVAYSQAFQLSGDEFYSDVAKGILQYVARSLSHRSGGFYSAEDADSPPERGQRPKEGAYYVWTVKEVQQLLPEPVLGATEPLTSGQLLMKHYGLTEAGNISPSQDPKGELQGQNVLTVRYSLELTAARFGLDVEAVRTLLNSGLEKLFQARKHRPKPHLDSKMLAAWNGLMVSGYAVTGAVLGQDRLINYATNGAKFLKRHMFDVASGRLMRTCYTGPGGTVEHSNPPCWGFLEDYAFVVRGLLDLYEASQESAWLEWALRLQDTQDKLFWDSQGGGYFCSEAELGAGLPLRLKDDQDGAEPSANSVSAHNLLRLHGFTGHKDWMDKCVCLLTAFSERMRRVPVALPEMVRALSAQQQTLKQIVICGDRQAKDTKALVQCVHSVYIPNKVLILADGDPSSFLSRQLPFLSTLRRLEDQATAYVCENQACSVPITDPCELRKLLHP

SEQ ID NO: 12697 - protein, 56 aa, Homo Sapiens
MLGARAWLGRVLLLPRAGAGLAASRRCPGVWPRTWPHRSPSRPRRLGETNLARSPQ

SEQ ID NO: 12698 - protein, 67 aa, Homo Sapiens
MLGARAWLGRVLLLPRAGAGLAASRRCPGVWPRTWPHRSPSRWALSEGVPMSGFLCLSLTWSSPRPY

SEQ ID NO: 12699 - protein, 786 aa, Homo Sapiens
MLGARAWLGRVLLLPRAGAGLAASRRGSSSRDKDRSATVSSSVPMPAGGKGSHPSSTPQRVPNRLIHEKSPYLLQHAYNPVDWYPWGQEAFDKARKENKPIFLSVGYSTCHWCHMMEEESFQNEEIGRLLSEDFVSVKVDREERPDVDKVYMTFVQATSSGGGWPMNVWLTPNLQPFVGGTYFPPEDGLTRVGFRTVLLRIREQWKQNKNTLLENSQRVTTALLARSEISVGDRQLPPSAATVNNRCFQQLDEGYDEEYGGFAEAPKFPTPVILSFLFSYWLSHRLTQDGSRAQQMALHTLKMMANGGIRDHVGQGFHRYSTDRQWHVPHFEKMLYDQAQLAVAYSQAFQLSGDEFYSDVAKGILQYVARSLSHRSGGFYSAEDADSPPERGQRPKEGAYYVWTVKEVQQLLPEPVLGATEPLTSGQLLMKHYGLTEAGNISPSQDPKGELQGQNVLTVRYSLELTAARFGLDVEAVRTLLNSGLEKLFQARKHRPKPHLDSKMLAAWNGLMVSGYAVTGAVLGQDRLINYATNGAKFLKRHMFDVASGRLMRTCYTGPGGTVEHSNPPCWGFLEDYAFVVRGLLDLYEASQESAWLEWALRLQDTQDKLFWDSQGGGYFCSEAELGAGLPLRLKDDQDGAEPSANSVSAHNLLRLHGFTGHKDWMDKCVCLLTAFSERMRRVPVALPEMVRALSAQQQTLKQIVICGDRQAKDTKALVQCVHSVYIPNKVLILADGDPSSFLSRQLPFLSTLRRLEDQATAYVCENQACSVPITDPCELRKLLHP

SEQ ID NO: 12700 - protein, 43 aa, Homo Sapiens
MLGARAWLGRVLLLPRAGAGLAASRRSACSPTSRLNSLRSLIP

SEQ ID NO: 12701 - protein, 43 aa, Homo Sapiens; identical to SEQ ID NO: 12700

SEQ ID NO: 12702 - protein, 43 aa, Homo Sapiens; identical to SEQ ID NO: 12700

SEQ ID NO: 12703 - protein, 43 aa, Homo Sapiens; identical to SEQ ID NO: 12700

SEQ ID NO: 12704 - protein, 43 aa, Homo Sapiens; identical to SEQ ID NO: 12700

SEQ ID NO: 12705 - protein, 742 aa, Homo Sapiens
MPAGGKGSHPSSTPQRVPNRLIHEKSPYLLQHAYNPVDWYPWGQEAFDKARKENKPIFLSVGYSTCHWCHMMEEESFQNEEIGRLLSEDFVSVKVDREERPDVDKVYMTFVQATSSGGGWPMNVWLTPNLQPFVGGTYFPPEDGLTRVGFRTVLLRIREQWKQNKNTLLENSQRVTTALLARSEISVGDRQLPPSAATVNNRCFQQLDEGYDEEYGGFAEAPKFPTPVILSFLFSYWLSHRLTQDGSRAQQMALHTLKMMANGGIRDHVGQGFHRYSTDRQWHVPHFEKMLYDQAQLAVAYSQAFQLSGDEFYSDVAKGILQYVARSLSHRSGGFYSAEDADSPPERGQRPKEGAYYVWTVKEVQQLLPEPVLGATEPLTSGQLLMKHYGLTEAGNISPSQDPKGELQGQNVLTVRYSLELTAARFGLDVEAVRTLLNSGLEKLFQARKHRPKPHLDSKMLAAWNGLMVSGYAVTGAVLGQDRLINYATNGAKFLKRHMFDVASGRLMRTCYTGPGGTVEHSNPPCWGFLEDYAFVVRGLLDLYEASQESAWLEWALRLQDTQDKLFWDSQGGGYFCSEAELGAGLPLRLKDDQDGAEPSANSVSAHNLLRLHGFTGHKDWMDKCVCLLTAFSERMRRVPVALPEMVRALSAQQQTLKQIVICGDRQAKDTKALVQCVHSVYIPNKVLILADGDPSSFLSRQLPFLSTLRRLEDQATAYVCENQACSVPITDPCELRKLLHP

SEQ ID NO: 12706 - protein, 521 aa, Homo Sapiens
MSHLSSPPKKHKGEHKGHSLPHGSERGSSSRDKDRSATVSSSVPMPAGGKGSHPSSTPQRVPNRLIHEKSPYLLQHAYNPVDWYPWGQEAFDKARKENKPIFLSVGYSTCHWCHMMEEESFQNEEIGRLLSEDFVSVKVDREERPDVDKVYMTFVQATSSGGGWPMNVWLTPNLQPFVGGTYFPPEDGLTRVGFRTVLLRIREQWKQNKNTLLENSQRVTTALLARSEISVGDRQLPPSAATVNNRCFQQLDEGYDEEYGGFAEAPKFPTPVILSFLFSYWLSHRLTQDGSRAQQMALHTLKMMANGGIRDHVGQGFHRYSTDRQWHVPHFEKMLYDQAQLAVAYSQAFQLSGDEFYSDVAKGILQYVARSLSHRSGGFYSAEDADSPPERGQRPKEGAYYVWTVKEVQQLLPEPVLGATEPLTSGQLLMKHYGLTEAGNISPSQDPKGELQGQNVLTVRYSLELTAARFGLDVEAVRTLLNSGLEKLFQARKHRPKPHLDSKMLAAWNGGAAHLRPSLSA

SEQ ID NO: 12707 - protein, 786 aa, Homo Sapiens
MSHLSSPPKKHKGEHKGHSLPHGSERGSSSRDKDRSATVSSSVPMPAGGKGSHPSSTPQRVPNRLIHEKSPYLLQHAYNPVDWYPWGQEAFDKARKENKPIFLSVGYSTCHWCHMMEEESFQNEEIGRLLSEDFVSVKVDREERPDVDKVYMTFVQATSSGGGWPMNVWLTPNLQPFVGGTYFPPEDGLTRVGFRTVLLRIREQWKQNKNTLLENSQRVTTALLARSEISVGDRQLPPSAATVNNRCFQQLDEGYDEEYGGFAEAPKFPTPVILSFLFSYWLSHRLTQDGSRAQQMALHTLKMMANGGIRDHVGQGFHRYSTDRQWHVPHFEKMLYDQAQLAVAYSQAFQLSGDEFYSDVAKGILQYVARSLSHRSGGFYSAEDADSPPERGQRPKEGAYYVWTVKEVQQLLPEPVLGATEPLTSGQLLMKHYGLTEAGNISPSQDPKGELQGQNVLTVRYSLELTAARFGLDVEAVRTLLNSGLEKLFQARKHRPKPHLDSKMLAAWNGLMVSGYAVTGAVLGQDRLINYATNGAKFLKRHMFDVASGRLMRTCYTGPGGTVEHSNPPCWGFLEDYAFVVRGLLDLYEASQESAWLEWALRLQDTQDKLFWDSQGGGYFCSEAELGAGLPLRLKDDQDGAEPSANSVSAHNLLRLHGFTGHKDWMDKCVCLLTAFSERMRRVPVALPEMVRALSAQQQTLKQIVICGDRQAKDTKALVQCVHSVYIPNKVLILADGDPSSFLSRQLPFLSTLRRLEDQATAYVCENQACSVPITDPCELRKLLHP

SEQ ID NO: 12708 - protein, 247 aa, Homo Sapiens
  misc_feature (1)..(1): Xaa can be any naturally occurring amino acid
XESFQNEEIGRLLSEDFVSVKVDREERPDVDKVYMTFVQATSSGGGWPMNVWLTPNLQPFVGGTYFPPEDGLTRVGFRTVLLRIREQWKQNKNTLLENSQRVTTALLARSEISVGDRQLPPSAATVNNRCFQQLDEGYDEEYGGFAEAPKFPTPVILSFLFSYWLSHRLTQDGSRAQQMALHTLKMMANGGIRDHVGQTASGTSLTLRRCSMTRHSSLWPIRRPSSSLVMNSTLTWPKASCSTWLGA

SEQ ID NO: 12709 - protein, 110 aa, Homo Sapiens
  misc_feature (1)..(1): Xaa can be any naturally occurring amino acid
XQAQLAVAYSQAFQLSGDEFYSDVAKGILQYVARSLSHRSGGFYSAEDADSPPERGQRPKEGAYYVWTVKEVQQLLPEPVLGATEPLTSGQLLMKHYGLTEAGNISPSQA

SEQ ID NO: 12710 - protein, 350 aa, Homo Sapiens
MKPLVLLVALLLWPSSVPAYPSITVTPDEEQNLNHYIQVLENLVRSVPSGEPGREKKSNSPKHVYSIASKGSKFKELVTHGDASTENDVLTNPISEETTTFPTGGFTPEIGKKKHTESTPFWSIKPNNVSIVLHAEEPYIENEEPEPEPEPAAKQTEAPRMLPVVTESSTSPYVTSYKSPVTTLDKSTGIGISTESEDVPQLSGETAIEKPEEFGKHPESWNNDDILKKILDINSQVQQALLSDTSNPAYREDIEASKDHLKRSLALAAAAEHKLKTMYKSQLLPVGRTSNKIDDIETVINMLCNSRSKLYEYLDIKCVPPEMREKAATVFNTLKNMCRSRRVTALLKVY

SEQ ID NO: 12711 - protein, 65 aa, Homo Sapiens
MKVTGIFLLSALALLSLSGNTGADSLGREAKCYNELNGCTKIYDPVCGTDGNTYPNECVLCFENR

SEQ ID NO: 12712 - protein, 79 aa, Homo Sapiens
MKVTGIFLLSALALLSLSGNTGADSLGREAKCYNELNGCTKIYDPVCGTDGNTYPNECVLCFENRKRQTSILIQKSGPC

SEQ ID NO: 12713 - protein, 94 aa, Homo Sapiens
MAAFPHKIIFFLVCSTLTHVAFSGIFNKRDFTRWPKPRCKMYIPLDPDYNADCPNVTAPVCASNGHTFQNECFFCVEQREFHYRIKFEKYGKCD

SEQ ID NO: 12714 - protein, 94 aa, Homo Sapiens; identical to SEQ ID NO: 12713

SEQ ID NO: 12715 - protein, 54 aa, Homo Sapiens
MYIPLDPDYNADCPNVTAPVCASNGHTFQNECFFCVEQREFHYRIKFEKYGKCD

SEQ ID NO: 12716 - protein, 47 aa, Homo Sapiens
MAKSFPVFSLLSFILIHLVLSSVSGPRHWWPPRGIIKEISWKNQVLP

SEQ ID NO: 12717 - protein, 97 aa, Homo Sapiens
MAKSFPVFSLLSFILIHLVLSSVSGPRHWWPPRGIIKVKCPYEKVNLSWYNGTVNPCPGLYQPICGTNFITYDNPCILCVESLKSHGRIRFYHDGKC

SEQ ID NO: 12718 - protein, 84 aa, Homo Sapiens
MALSVLRLALLLLAVTFAASLIPQFGLFSKYRTPNCSQYRLPGCPRHFNPVCGSDMSTYANECTLCMKIREGGHNIKIIRNGPC

SEQ ID NO: 12719 - protein, 119 aa, Homo Sapiens
MALSVLRLALLLLAVTFAGSARSGPGERGPPEKSGFGSQTGGGPCPAPGGLGDASLIPQFGLFSKYRTPNCSQYRLPGCPRHFNPVCGSDMSTYANECTLCMKIREGGHNIKIIRNGPC

SEQ ID NO: 12720 - protein, 88 aa, Homo Sapiens [sequence omitted]

SEQ ID NO: 12721 - protein, 134 aa, Homo Sapiens
MALSVLRLALLLLAVTFAGSARSGPGERGPPEKSGFGSQTGGGPCPAPGGLGDGTRAPVTGGSPEDLPASLIPQFGLFSKYRTPNCSQYRLPGCPRHFNPVCGSDMSTYANECTLCMKIREGGHNIKIIRNGPC

SEQ ID NO: 12722 - protein, 103 aa, Homo Sapiens [sequence omitted]

SEQ ID NO: 12723 - protein, 134 aa, Homo Sapiens
MALSVLRLALLLLAVTFAGSARSGPGERGPPEKSGFGSQTGGGPCPAPGGLGDGTRAPVTGGSPEDLPGKVVIILKSFEMDPADGAVYRKEDGETTFTGRLDKLHFPFFSFPVFLYMRFVNTHFLRAGMEDSHV

SEQ ID NO: 12724 - protein, 86 aa, Homo Sapiens
MAVRQWVIALALAALLVVDREVPVAAGKLPFSRMPICEHMVESPTCSQMSNLVCGTDGLTYTNECQLCLARIKTKQDIQIMKDGKC

SEQ ID NO: 12725 - protein, 109 aa, Homo Sapiens
MILGIGSSPHLLWTLEGTHIWSLLGDASHTDRLPEAGAGKLLSEVPVAAGKLPFSRMPICEHMVESPTCSQMSNLVCGTDGLTYTNECQLCLARIKTKQDIQIMKDGKC

SEQ ID NO: 12726 - protein, 68 aa, Homo Sapiens
MKIATVSVLLPLALCLIQDAASKNEDQDKKFFQSLDGIMFINKCATCKMILEKEAKSQKRARHLARAP

SEQ ID NO: 12727 - protein, 869 aa, Homo Sapiens
MKIATVSVLLPLALCLIQDAASKNEDQDKKFFQSLDGIMFINKCATCKMILEKEAKSQKRARHLARAPKATAPTELNCDDFKKGERDGDFICPDYYEAVCGTDGKTYDNRCALCAENAKTGSQIGVKSEGECKSSNPEQDVCSAFRPFVRDGRLGCTRENDPVLGPDGKTHGNKCAMCAELFLKEAENAKREGETRIRRNAEKDFCKEYEKQVRNGRLFCTRESDPVRGPDGRMHGNKCALCAEIFKQRFSEENSKTDQNLGKAEEKTKVKREIVKLCSQYQNQAKNGILFCTRENDPIRGPDGKMHGNLCSMCQAYFQAENEEKKKAEARARNKRESGKATSYAELCSEYRKLVRNGKLACTRENDPIQGPDGKVHGNTCSMCEVFFQAEEEEKKKKEGKSRNKRQSKSTASFEELCSEYRKSRKNGRLFCTRENDPIQGPDGKMHGNTCSMCEAFFQQEERARAKAKREAAKEICSEFRDQVRNGTLICTREHNPVRGPDGKMHGNKCAMCASVFKLEEEEKKNDKEEKGKVEAEKVKREAVQELCSEYRHYVRNGRLPCTRENDPIEGLDGKIHGNTCSMCEAFFQQEAKEKERAEPRAKVKREAEKETCDEFRRLLQNGKLFCTRENDPVRGPDGKTHGNKCAMCKAVFQKENEERKRKEEEDQRNAAGHGSSGGGGGNTQDECAEYREQMKNGRLSCTRESDPVRDADGKSYNNQCTMCKAKLEREAERKNEYSRSRSNGTGSESGKDTCDEFRSQMKNGKLICTRESDPVRGPDGKTHGNKCTMCKEKLEREAAEKKKKEDEDRSNTGERSNTGERSNDKEDLCREFRSMQRNGKLICTRENNPVRGPYGKMHINKCAMCQSI

SEQ ID NO: 12728 - protein, 1064 aa, Homo Sapiens
MKIATVSVLLPLALCLIQDAASKNEDQEMCHEFQAFMKNGKLFCPQDKKFFQSLDGIMFINKCATCKMILEKEAKSQKRARHLARAPKATAPTELNCDDFKKGERDGDFICPDYYEAVCGTDGKTYDNRCALCAENAKTGSQIGVKSEGECKSSNPEQDVCSAFRPFVRDGRLGCTRENDPVLGPDGKTHGNKCAMCAELFLKEAENAKREGETRIRRNAEKDFCKEYEKQVRNGRLFCTRESDPVRGPDGRMHGNKCALCAEIFKQRFSEENSKTDQNLGKAEEKTKVKREIVKLCSQYQNQAKNGILFCTRENDPIRGPDGKMHGNLCSMCQAYFQAENEEKKKAEARARNKRESGKATSYAELCSEYRKLVRNGKLACTRENDPIQGPDGKVHGNTCSMCEVFFQAEEEEKKKKEGKSRNKRQSKSTASFEELCSEYRKSRKNGRLFCTRENDPIQGPDGKMHGNTCSMCEAFFQQEERARAKAKREAAKEICSEFRDQVRNGTLICTREHNPVRGPDGKMHGNKCAMCASVFKLEEEEKKNDKEEKGKVEAEKVKREAVQELCSEYRHYVRNGRLPCTRENDPIEGLDGKIHGNTCSMCEAFFQQEAKEKERAEPRAKVKREAEKETCDEFRRLLQNGKLFCTRENDPVRGPDGKTHGNKCAMCKAVFQKENEERKRKEEEDQRNAAGHGSSGGGGGNTQDECAEYREQMKNGRLSCTRESDPVRDADGKSYNNQCTMCKAKLEREAERKNEYSRSRSNGTGSESGKDTCDEFRSQMKNGKLICTRESDPVRGPDGKTHGNKCTMCKEKLEREAAEKKKKEDEDRSNTGERSNTGERSNDKEDLCREFRSMQRNGKLICTRENNPVRGPYGKMHINKCAMCQSIFDREANERKKKDEEKSSSKPSNNAKDECSEFRNYIRNNELICPRENDPVHGADGKFYTNKCYMCRAVFLTEALERAKLQEKPSHVRASQEEDSPDSFSSLDSEMCKDYRVLPRIGYLCPKDLKPVCGDDGQTYNNPCMLCHENLIRQTNTHIRSTGKCEESSTPGTTAASMPPSDE

SEQ ID NO: 12729 - protein, 1094 aa, Homo Sapiens
MKIATVSVLLPLALCLIQDAASKNEDQEMCHEFQAFMKNGKLFCPQDKKFFQSLDGIMFINKCATCKMILEKEAKSQKRARHLARAPKATAPTELNCDDFKKGERDGDFICPDYYEAVCGTDGKTYDNRCALCAENAKTGSQIGVKSEGECKSSNPEQDVCSAFRPFVRDGRLGCTRENDPVLGPDGKTHGNKCAMCAELFLKEAENAKREGETRIRRNAEKDFCKEYEKQVRNGRLFCTRESDPVRGPDGRMHGNKCALCAEIFKQRFSEENSKTDQNLGKAEEKTKVKREIVKLCSQYQNQAKNGILFCTRENDPIRGPDGKMHGNLCSMCQAYFQAENEEKKKAEARARNKRESGKATSYAELCSEYRKLVRNGKLACTRENDPIQGPDGKVHGNTCSMCEVFFQAEEEEKKKKEGKSRNKRQSKSTASFEELCSEYRKSRKNGRLFCTRENDPIQGPDGKMHGNTCSMCEAFFQQEERARAKAKREAAKEICSEFRDQVRNGTLICTREHNPVRGPDGKMHGNKCAMCASVFKLEEEEKKNDKEEKGKVEAEKVKREAVQELCSEYRHYVRNGRLPCTRENDPIEGLDGKIHGNTCSMCEAFFQQEAKEKERAEPRAKVKREAEKETCDEFRRLLQNGKLFCTRENDPVRGPDGKTHGNKCAMCKAVFQKENEERKRKEEEDQRNAAGHGSSGGGGGNTQDECAEYREQMKNGRLSCTRESDPVRDADGKSYNNQCTMCKAKLEREAERKNEYSRSRSNGTGSESGKDTCDEFRSQMKNGKLICTRESDPVRGPDGKTHGNKCTMCKEKLEREAAEKKKKEDEDRSNTGERSNTGERSNDKEDLCREFRSMQRNGKLICTRENNPVRGPYGKMHINKCAMCQSIFDREANERKKKDEEKSSSKPSNNAKDQCRQVQNEAEDAKFRQPGRSLASVARMSTDECSEFRNYIRNNELICPRENDPVHGADGKFYTNKCYMCRAVFLTEALERAKLQEKPSHVRASQEEDSPDSFSSLDSEMCKDYRVLPRIGYLCPKDLKPVCGDDGQTYNNPCMLCHENLIRQTNTHIRSTGKCEESSTPGTTAASMPPSDE

SEQ ID NO: 12730 - protein, 916 aa, Homo Sapiens
MKIATVSVLLPLALCLIQDAASKNEDQEMCHEFQAFMKNGKLFCPQDKKFFQSLDGIMFINKCATCKMILEKEAKSQKRARHLARAPKATAPTELNCDDFKKGERDGDFICPDYYEAVCGTDGKTYDNRCALCAENAKTGSQIGVKSEGECKSSNPEQDVCSAFRPFVRDGRLGCTRENDPVLGPDGKTHGNKCAMCAELFLKEAENAKREGETRIRRNAEKDFCKEYEKQVRNGRLFCTRESDPVRGPDGRMHGNKCALCAEIFKQRFSEENSKTDQNLGKAEEKTKVKREIVKLCSQYQNQAKNGILFCTRENDPIRGPDGKMHGNLCSMCQAYFQAENEEKKKAEARARNKRESGKATSYAELCSEYRKLVRNGKLACTRENDPIQGPDGKVHGNTCSMCEVFFQAEEEEKKKKEGKSRNKRQSKSTASFEELCSEYRKSRKNGRLFCTRENDPIQGPDGKMHGNTCSMCEAFFQQEERARAKAKREAAKEICSEFRDQVRNGTLICTREHNPVRGPDGKMHGNKCAMCASVFKLEEEEKKNDKEEKGKVEAEKVKREAVQELCSEYRHYVRNGRLPCTRENDPIEGLDGKIHGNTCSMCEAFFQQEAKEKERAEPRAKVKREAEKETCDEFRRLLQNGKLFCTRENDPVRGPDGKTHGNKCAMCKAVFQKENEERKRKEEEDQRNAAGHGSSGGGGGNTQDECAEYREQMKNGRLSCTRESDPVRDADGKSYNNQCTMCKAKLEREAERKNEYSRSRSNGTGSESGKDTCDEFRSQMKNGKLICTRESDPVRGPDGKTHGNKCTMCKEKLEREAAEKKKKEDEDRSNTGERSNTGERSNDKEDLCREFRSMQRNGKLICTRENNPVRGPYGKMHINKCAMCQSIFDREANERKKKDEEKSSSKPSNNAKVIY

SEQ ID NO: 12731 - protein, 201 aa, Homo Sapiens
MKIATVSVLLPLALCLIQDAASKNEDQEMCHEFQAFMKNGKLFCPQDKKFFQSLDGIMFINKCATCKMILEKEAKSQKRARHLARAPKATAPTELNCDDFKKGERDGDFICPDYYEAVCGTDGKTYDNRCALCAENAKTGSQIGVKSEGECKSSNPEQFCEPVMVGEGEGRKDLIHVTLVFFQEIGSKLMARTVLCLSSGT

SEQ ID NO: 12732 - protein, 41 aa, Homo Sapiens
MKLSGMFLLLSLALFCFLTGVFSQGGQVDCGEFQDPKVYCT

SEQ ID NO: 12733 - protein, 80 aa, Homo Sapiens
MKLSGMFLLLSLALFCFLTGVFSQGGQVDCGEFQDPKVYCTRESNPHCGSDGQTYGNKCAFCKAIVKSGGKISLKHPGKC

SEQ ID NO: 12734 - protein, 80 aa, Homo Sapiens; identical to SEQ ID NO: 12733

SEQ ID NO: 12735 - protein, 85 aa, Homo Sapiens
MKITGGLLLLCTVVYFCSSSEAASLSPKKVDCSIYKKYPVVAIPCPITYLPVCGSDYITYGNECHLCTESLKSNGRVQFLHDGSC

SEQ ID NO: 12736 - protein, 59 aa, Homo Sapiens
MTQVDCSIYKKYPVVAIPCPITYLPVCGSDYITYGNECHLCTESLKSNGRVQFLHDGSC

SEQ ID NO: 12737 - protein, 97 aa, Homo Sapiens
MKGICSDAILVLATSMWMAFAIDFPLPMASERGQLDKTIVECLKNVNKCWFLSYIKPSEPICGSDQVTYSSDCHLCSKILFEGLNITKLYDGQCENS

SEQ ID NO: 12738 - protein, 86 aa, Homo Sapiens
MRATAIVLLLALTLATMFSIECAKQTKQMVDCSHYKKLPPGQQRFCHHMYDPICGSDGKTYKNDCFFCSKVKKTDGTLKFVHFGKC

SEQ ID NO: 12739 - protein, 107 aa, Homo Sapiens
MVFMNPSHHCFHYKTPPSSSGEHNEPRRLMGLTQPEHLQGIECAKQTKQMVDCSHYKKLPPGQQRFCHHMYDPICGSDGKTYKNDCFFCSKVKKTDGTLKFVHFGKC

SEQ ID NO: 12740 - protein, 294 aa, Homo Sapiens
ELWGLKEGTYLFQLTVTSSDHPEDTANVTVTVLSTKQTEDYCLASNKVGRCRGSFPRWYYDPTEQICKSFVYGGCLGNKNNYLREEECILACRGVQVCSGTCQPTQFRCSNGCCIDSFLECDDTPNCPDASDEAACEKYTSGFDELQRIHFPSDKGHCVDLPDTGLCKESIPRWYYNPFSEHCARFTYGGCYGNKNNFEEEQQCLESCRGISKKDVFGLRREIPIPSTGSVEMAVAVFLVICIVVVVAILGYCFFKNQRKDFHGHHHHPPPTPASSTVSTTEDTEHLVYNHTTR

SEQ ID NO: 12741 - protein, 529 aa, Homo Sapiens
MAPARTMARARLAPAGIPAVALWLLCTLGLQGTQAGPPPAPPGLPAGADCLNSFTAGVPGFVLDTNASVSNGATFLESPTVRRGWDCVRACCTTQNCNLALVELQPDRGEDAIAACFLINCLYEQNFVCKFAPREGFINYLTREVYRSYRQLRTQGFGGSGIPKAWAGIDLKVQPQEPLVLKDVENTDWRLLRGDTDVRVERKDPNQVELWGLKEGTYLFQLTVTSSDHPEDTANVTVTVLSTKQTEDYCLASNKVGRCRGSFPRWYYDPTEQICKSFVYGGCLGNKNNYLREEECILACRGVQGGPLRGSSGAQATFPQGPSMERRHPVCSGTCQPTQFRCSNGCCIDSFLECDDTPNCPDASDEAACEKYTSGFDELQRIHFPSDKGHCVDLPDTGLCKESIPRWYYNPFSEHCARFTYGGCYGNKNNFEEEQQCLESCRGISKKDVFGLRREIPIPSTGSVEMAVAVFLVICIVVVVAILGYCFFKNQRKDFHGHHHHPPPTPASSTVSTTEDTEHLVYNHTTRPL

SEQ ID NO: 12742 - protein, 513 aa, Homo Sapiens
MAPARTMARARLAPAGIPAVALWLLCTLGLQGTQAGPPPAPPGLPAGADCLNSFTAGVPGFVLDTNASVSNGATFLESPTVRRGWDCVRACCTTQNCNLALVELQPDRGEDAIAACFLINCLYEQNFVCKFAPREGFINYLTREVYRSYRQLRTQGFGGSGIPKAWAGIDLKVQPQEPLVLKDVENTDWRLLRGDTDVRVERKDPNQVELWGLKEGTYLFQLTVTSSDHPEDTANVTVTVLSTKQTEDYCLASNKVGRCRGSFPRWYYDPTEQICKSFVYGGCLGNKNNYLREEECILACRGVQGPSMERRHPVCSGTCQPTQFRCSNGCCIDSFLECDDTPNCPDASDEAACEKYTSGFDELQRIHFPSDKGHCVDLPDTGLCKESIPRWYYNPFSEHCARFTYGGCYGNKNNFEEEQQCLESCRGISKKDVFGLRREIPIPSTGSVEMAVAVFLVICIVVVVAILGYCFFKNQRKDFHGHHHHPPPTPASSTVSTTEDTEHLVYNHTTRPL

SEQ ID NO: 12743 - protein, 302 aa, Homo Sapiens
MAPARTMARARLAPAGIPAVALWLLCTLGLQGTQAGPPPAPPGLPAGADCLNSFTAGVPGFVLDTNASVSNGATFLESPTVRRGWDCVRACCTTQNCNLALVELQPDRGEDAIAACFLINCLYEQNFVCKFAPREGFINYLTREVYRSYRQLRTQGFGGSGIPKAWAGIDLKVQPQEPLVLKDVENTDWRLLRGDTDVRVERKDPNQVELWGLKEGTYLFQLTVTSSDHPEDTANVTVTVLSTKQTEDYCLASNKVGRCRGSFPRWYYDPTEQICKSFVYGGCLGNKNNYLREEECILACRG

SEQ ID NO: 12744 - protein, 472 aa, Homo Sapiens
PPGLPAGADCLNSFTAGVPGFVLDTNASVSNGATFLESPTVRRGWDCVRACCTTQNCNLALVELQPDRGEDAIAACFLINCLYEQNFVCKFAPREGFINYLTREVYRSYRQLRTQGFGGSGIPKAWAGIDLKVQPQEPLVLKDVENTDWRLLRGDTDVRVERKDPNQVELWGLKEGTYLFQLTVTSSDHPEDTANVTVTVLSTKQTEDYCLASNKVGRCRGSFPRWYYDPTEQICKSFVYGGCLGNKNNYLREEECILACRGVQGGPLRGSSGAQATFPQVCSGTCQPTQFRCSNGCCIDSFLECDDTPNCPDASDEAACEKYTSGFDELQRIHFPSDKGHCVDLPDTGLCKESIPRWYYNPFSEHCARFTYGGCYGNKNNFEEEQQCLESCRGISKKDVFGLRREIPIPSTGSVEMAVAVFLVICIVVVVAILGYCFFKNQRKDFHGHHHHPPPTPASSTVSTTEDTEHLV

SEQ ID NO: 12745 - protein, 313 aa, Homo Sapiens
  misc_feature (1)..(1): Xaa can be any naturally occurring amino acid
XEKAAEPQLSEHRVGSRDPSRAGSWDRNLGGPGPTQLTCAGHQHPRNPEARALKVTPLGRKAMAPARTMARARLAPAGIPAVALWLLCTLGLQGTQAGPPPAPPGLPAGADCLNSFTAGVPGFVLDTNASVSNGATFLESPTVRRGWDCVRACCTTQNCNLALVELQPDRGEDAIAACFLINCLYEQNFVCKFAPREGFINYLTREVYRSYRQLRTQGFGGSGIPKAWAGIDLKVQPQEPLVLKDVENTDWRLLRGDTDVRVELTVTSSDHPEDTANVTVTVLSTKQTEDYCLASNKVGRCRGSFPRWYYDPT

SEQ ID NO: 12746 - protein, 204 aa, Homo Sapiens
  misc_feature (1)..(1): Xaa can be any naturally occurring amino acid
XLGNKNNYLREEECILACRGVQGGPLRGSSGAQATFPQGPSMERRHPDTSGFDELQRIHFPSDKGHCVDLPDTGLCKESIPRWYYNPFSEHCARFTYGGCYGNKNNFEEEQQCLESCRGISKKDVFGLRREIPIPSTGSVEMAVAVFLVICIVVVVAILGYCFFKNQRKDFHGHHHHPPPTPASSTVSTTEDTEHLVYNHTTRP

SEQ ID NO: 12747 - protein, 240 aa, Homo Sapiens
  misc_feature (1)..(1): Xaa can be any naturally occurring amino acid
XVENTDWRLLRGDTDVRVERKDPNQVELWGLKEGTYLFQLTVTSSDHPEDTANVTVTVLSTKQTEDYCLASNKVGRCRGSFPRWYYDPTEQICKSFVYGGCLGNKNNYLREEECILACRGVQGPSMERRHPDTSGFDELQRIHFPSDKGHCVDLPDTGLCKESIPRWYYNPFSEHCARFTYGGCYGNKNNFEEEQQCLESCRGISKKDVFGLRREIPIPSTGSVEMAVAVFLVICIVVVV

SEQ ID NO: 12748 - protein, 175 aa, Homo Sapiens [sequence omitted]

SEQ ID NO: 12749 - protein, 252 aa, Homo Sapiens
MAQLCGLRRSRAFLALLGSLLLSGVLAADRERSIHDFCLVSKVVGRCRASMPRWWYNVTDGSCQLFVYGGCDGNSNNYLTKEECLKKCATVTENATGDLATSRNAADSSVPSAPRRQDSEDHSSDMFNYEEYCTANAVTGPCRASFPRWYFDVERNSCNNFIYGGCRGNKNSYRSEEACMLRCFRQQENPPLPLGSKVVVLAGLFVMVLILFLGASMVYLIRVARRNQERALRTVWSSGDDKEQLVKNTYVL

SEQ ID NO: 12750 - protein, 195 aa, Homo Sapiens
MAQLCGLRRSRAFLALLGSLLLSGVLAADRERSIHENATGDLATSRNAADSSVPSAPRRQDSEDHSSDMFNYEEYCTANAVTGPCRASFPRWYFDVERNSCNNFIYGGCRGNKNSYRSEEACMLRCFRQQENPPLPLGSKVVVLAGLFVMVLILFLGASMVYLIRVARRNQERALRTVWSSGDDKEQLVKNTYVL

SEQ ID NO: 12751 - protein, 52 aa, Homo Sapiens
MPRWWYNVTDGSCQLFVYGGCDGNSNNYLTKEECLKKCATVTENATGDLATS

SEQ ID NO: 12752 - protein, 62 aa, Homo Sapiens
MPRWWYNVTDGSCQLFVYGGCDGNSNNYLTKEECLKKCATVTENATGDLATSRNAADSSVPS

SEQ ID NO: 12753 - protein, 202 aa, Homo Sapiens
MPRWWYNVTDGSCQLFVYGGCDGNSNNYLTKEECLKKCATVTENATGDLATSRNAADSSVPSAPRRQDSEDHSSDMFNYEEYCTANAVTGPCRASFPRWYFDVERNSCNNFIYGGCRGNKNSYRSEEACMLRCFRQQENPPLPLGSKVVVLAGLFVMVLILFLGASMVYLIRVARRNQERALRTVWSSGDDKEQLVKNTYVL

SEQ ID NO: 12754 - protein, 130 aa, Homo Sapiens
  misc_feature (1)..(1): Xaa can be any naturally occurring amino acid
XPRRQDSEDHSSDMFNYEEYCTANAVTGPCRASFPRWYFDVERNSCNNFIYGGCRGNKNSYRSEEACMLRCFRQQENPPLPLGSKGKWPLTLLLPSACLLPSLTELSPAQLWFTLSFTVNIILAESHVSA

SEQ ID NO: 12755 - protein, 106 aa, Homo Sapiens
  misc_feature (1)..(1): Xaa can be any naturally occurring amino acid
XRGTPAITSSMEAAGAIRTATALRRPACSAASAVCSLPGQQENPPLPLGSKVVVLAGLFVMVLILFLGASMVYLIRVARRNQERALRTVWSSGDDKEQLVKNTYVL

SEQ ID NO: 12756 - protein, 89 aa, Homo Sapiens
MQLQASLSFLLILTLCLELRSELARDTIKDLLPNVCAFPMEKGPCQTYMTRWFFNFETGECELFAYGGCGGNSNNFLRKEKCEKFCKFT

SEQ ID NO: 12757 - protein, 99 aa, Homo Sapiens
MKSAKLGFLLRFFIFCSLNTLLLGGVNKIAEKICGDLKDPCKLDMNFGSCYEVHFRYFYNRTSKRCETFVFSGCNGNLNNFKLKIEREVACVAKYKPPR

SEQ ID NO: 12758 - protein, 377 aa, Homo Sapiens
DDYFRNWNPNKPFDQALDPSKDPCLKVKCSPHKVCVTQDYQTALCVSRKHLLPRQKKGNVAQKHWVGPSNLVKCKPCPVAQSAMVCGSDGHSYTSKCKLEFHACSTGKSLATLCDGPCPCLPEPEPPKHKAERSACTDKELRNLASRLKDWFGALHEDANRVIKPTSSNTAQGRFDTSILPICKDSLGWMFNKLDMNYDLLLDPSEINAIYLDKYEPCIKPLFNSCDSFKDGKLSNNEWCYCFQKPGGLPCQNEMNRIQKLSKGKSLLGAFIPRCNEEGYYKATQCHGSTGQCWCVDKYGNELAGSRKQGAVSCEEEQETSGDFGSGGSVVLLDDLEYERELGPKDKEGKLRVHTRAVTEDDEDEDDDKEDEVGYIW

SEQ ID NO: 12759 - protein, 139 aa, Homo Sapiens
MPAIAVLAAAAAAWCFLQVESRHLDALAGGAGPNHGNFLDNDQWLSTVSQYDRDKYWNRFRDDDYFRNWNPNKPFDQALDPSKDPCLKVKCSPHKVCVTQDYQTALCVSRKHLLPRQKKGNVAQKHWVGPSNLVKCKPC

SEQ ID NO: 12760 - protein, 439 aa, Homo Sapiens
MPAIAVLAAAAAAWCFLQVESRHLDALAGGAGPNHGNFLDNDQWLSTVSQYDRDKYWNRFRDDDYFRNWNPNKPFDQALDPSKDPCLKVKCSPHKVCVTQDYQTALCVSRKHLLPRQKKGNVAQKHWVGPSNLVKCKPCPVAQSAMVCGSDGHSYTSKCKLEFHACSTGKSLATLCDGPCPCLPEPEPPKHKAERSACTDKELRNLASRLKDWFGALHEDANRVIKPTSSNTAQGRFDTSILPICKDSLGWMFNKLDMNYDLLLDPSEINAIYLDKYEPCIKPLFNSCDSFKDGKLSNNEWCYCFQKPGGLPCQNEMNRIQKLSKGKSLLGAFIPRCNEEGYYKATQCHGSTGQCWCVDKYGNELAGSRKQGAVSCEEEQETSGDFGSGGSVVLLDDLEYERELGPKDKEGKLRVHTRAVTEDDEDEDDDKEDEVGYIW

SEQ ID NO: 12761 - protein, 67 aa, Homo Sapiens
MVCGSDGHSYTSKCKLEFHACSTGKSLATLCDGPCPCLPEPEPPKHKAERSACTDKELRNLASRLKD

SEQ ID NO: 12762 - protein, 424 aa, Homo Sapiens
MRAPGCGRLVLPLLLLAAAALAEGDAKGLKEGETPGNFMEDEQWLSSISQYSGKIKHWNRFRDEVEDDYIKSWEDNQQGDEALDTTKDPCQKVKCSRHKVCIAQGYQRAMCISRKKLEHRIKQPTVKLHGNKDSICKPCHMAQLASVCGSDGHTYSSVCKLEQQACLSSKQLAVRCEGPCPCPTEQAATSTADGKPETCTGQDLADLGDRLRDWFQLLHENSKQNGSASSVAGPASGLDKSLGASCKDSIGWMFSKLDTSADLFLDQTELAAINLDKYEVCIRPFFNSCDTYKDGRVSTAEWCFCFWREKPPCLAELERIQIQEAAKKKPGIFIPSCDEDGYYRKMQCDQSSGDCWCVDQLGLELTGTRTHGSPDCDDIVGFSGDFGSGVGWEDEEEKETEEAGEEAEEEEGEAGEADDGGYIW

SEQ ID NO: 12763 - protein, 424 aa, Homo Sapiens; identical to SEQ ID NO: 12762

SEQ ID NO: 12764 - protein, 423 aa, Homo Sapiens [sequence omitted]

SEQ ID NO: 12765 - protein, 77 aa, Homo Sapiens
MRAPGCGRLVLPLLLLAAAALAEGDAKGLKEGETPGNFMEDEQWLSSISQYSGKIKHWNRFRDVPSSDPPSTTQATP

SEQ ID NO: 12766 - protein, 385 aa, Homo Sapiens
MITQDHIHMSSGLSQDDYFRTWSPGKPFDQALDPAKDPCLKMKCSRHKVCIAQDSQTAVCISHRRLTHRMKEAGVDHRQWRGPILSTCKQCPVVYPSPVCGSDGHTYSFQCKLEYQACVLGKQISVKCEGHCPCPSDKPTSTSRNVKRACSDLEFREVANRLRDWFKALHESGSQNKKTKTLLRPERSRFDTSILPICKDSLGWMFNRLDTNYDLLLDQSELRSIYLDKNEQCTKAFFNSCDTYKDSLISNNEWCYCFQRQQDPPCQTELSNIQKRQGVKKLLGQYIPLCDEDGYYKPTQCHGSVGQCWCVDRYGNEVMGSRINGVADCAIDFEISGDFASGDFHEWTDDEDDEDDIMNDEDEIEDDDEDEGDDDDGGDDHDVYI

SEQ ID NO: 12767 - protein, 344 aa, Homo Sapiens
MKCSRHKVCIAQDSQTAVCISHRRLTHRMKEAGVDHRQWRGPILSTCKQCPVVYPSPVCGSDGHTYSFQCKLEYQACVLGKQISVKCEGHCPCPSDKPTSTSRNVKRACSDLEFREVANRLRDWFKALHESGSQNKKTKTLLRPERSRFDTSILPICKDSLGWMFNRLDTNYDLLLDQSELRSIYLDKNEQCTKAFFNSCDTYKDSLISNNEWCYCFQRQQDPPCQTELSNIQKRQGVKKLLGQYIPLCDEDGYYKPTQCHGSVGQCWCVDRYGNEVMGSRINGVADCAIDFEISGDFASGDFHEWTDDEDDEDDIMNDEDEIEDDDEDEGDDDDGGDDHDVYI

SEQ ID NO: 12768 - protein, 316 aa, Homo Sapiens
MKEAGVDHRQWRGPILSTCKQCPVVYPSPVCGSDGHTYSFQCKLEYQACVLGKQISVKCEGHCPCPSDKPTSTSRNVKRACSDLEFREVANRLRDWFKALHESGSQNKKTKTLLRPERSRFDTSILPICKDSLGWMFNRLDTNYDLLLDQSELRSIYLDKNEQCTKAFFNSCDTYKDSLISNNEWCYCFQRQQDPPCQTELSNIQKRQGVKKLLGQYIPLCDEDGYYKPTQCHGSVGQCWCVDRYGNEVMGSRINGVADCAIDFEISGDFASGDFHEWTDDEDDEDDIMNDEDEIEDDDEDEGDDDDGGDDHDVYI

SEQ ID NO: 12769 - protein, 63 aa, Homo Sapiens
MLKVSAVLCVCAAAWCSQSLAAAAAVAAAGGRSDGGNFLDDKQWLTTISQYDKEVGQWNKFRD

SEQ ID NO: 12770 - protein, 338 aa, Homo Sapiens
MLKVSAVLCVCAAAWCSQSLAAAAAVAAAGGRSDGGNFLDDKQWLTTISQYDKEVGQWNKFRDCKLEYQACVLGKQISVKCEGHCPCPSDKPTSTSRNVKRACSDLEFREVANRLRDWFKALHESGSQNKKTKTLLRPERSRFDTSILPICKDSLGWMFNRLDTNYDLLLDQSELRSIYLDKNEQCTKAFFNSCDTYKDSLISNNEWCYCFQRQQDPPCQTELSNIQKRQGVKKLLGQYIPLCDEDGYYKPTQCHGSVGQCWCVDRYGNEVMGSRINGVADCAIDFEISGDFASGDFHEWTDDEDDEDDIMNDEDEIEDDDEDEGDDDDGGDDHDVYI

SEQ ID NO: 12771 - protein, 173 aa, Homo Sapiens [sequence omitted]

SEQ ID NO: 12772 - protein, 161 aa, Homo Sapiens
MLKVSAVLCVCAAAWCSQSLAAAAAVAAAGGRSDGGNFLDDKQWLTTISQYDKEVGQWNKFRDDDYFRTWSPGKPFDQALDPAKDPCLKMKCSRHKVCIAQDSQTAVCISHRRLTHRMKEAGVDHRQWRGPILSTCKQCPVVYPSPVCGSDGHTYSFQCKL

SEQ ID NO: 12773 - protein, 433 aa, Homo Sapiens
MLKVSAVLCVCAAAWCSQSLAAAAAVAAAGGRSDGGNFLDDKQWLTTISQYDKEVGQWNKFRDDDYFRTWSPGKPFDQALDPAKDPCLKMKCSRHKVCIAQDSQTAVCISHRRLTHRMKEAGVDHRQWRGPILSTCKQCPVVYPSPVCGSDGHTYSFQCKLEYQACVLGKQISVKCEGHCPCPSDKPTSTSRNVKRACSDLEFREVANRLRDWFKALHESGSQNKKTKTLLRPERSRFDTSILPICKDSLGWMFNRLDTNYDLLLDQSELRSIYLDKNEQCTKAFFNSCDTYKDSLISNNEWCYCFQRQQDPPCQTELSNIQKRQGVKKLLGQYIPLCDEDGYYKPTQCHGSVGQCWCVDRYGNEVMGSRINGVADCAIDFEISGDFASGDFHEWTDDEDDEDDIMNDEDEIEDDDEDEGDDDDGGDDHDVYI

SEQ ID NO: 12774 - protein, 313 aa, Homo Sapiens
MLKVSAVLCVCAAAWCSQSLAAAAAVAAAGGRSDGGNFLDDKQWLTTISQYDKEVGQWNKFRDDDYFRTWSPGKPFDQALDPAKDPCLKMKCSRHKVCIAQDSQTAVCISHRRLTHRMKEAGVDHRQWRGPILSTCKQCPVVYPSPVCGSDGHTYSFQCKLEYQACVLGKQISVKCEGHCPCPSDKPTSTSRNVKRACSDLEFREVANRLRDWFKALHESGSQNKKTKTLLRPERSRFDTSILPICKDSLGWMFNRLDTNYDLLLDQSELRSIYLDKNEQCTKAFFNSCDTYKDSLISNNEWCYCFQRQQGKR

SEQ ID NO: 12775 - protein, 433 aa, Homo Sapiens; identical to SEQ ID NO: 12773

SEQ ID NO: 12776 - protein, 433 aa, Homo Sapiens; identical to SEQ ID NO: 12773

SEQ ID NO: 12777 - protein, 393 aa, Homo Sapiens
MLKVSAVLCVCAAAWCSQSLAAAAAVAAAGGRSDGGNFLDDKQWLTTISQYDKEVGQWNKFRDDDYFRTWSPGKPFDQALDPAKDPCLKMKCSRHKVCIAQDSQTAVCISHRRLTHRMKEAGVDHRQWRGPILSTCKQCPVVYPSPVCGSDGHTYSFQCKLEYQACVLGKQISVKCEGHCPCPSDKPTSTSRNVKRGFDTSILPICKDSLGWMFNRLDTNYDLLLDQSELRSIYLDKNEQCTKAFFNSCDTYKDSLISNNEWCYCFQRQQDPPCQTELSNIQKRQGVKKLLGQYIPLCDEDGYYKPTQCHGSVGQCWCVDRYGNEVMGSRINGVADCAIDFEISGDFASGDFHEWTDDEDDEDDIMNDEDEIEDDDEDEGDDDDGGDDHDVYI

SEQ ID NO: 12778 - protein, 89 aa, Homo Sapiens
MLKVSAVLCVCAAAWCSQSLAAAAAVAAAGGRSDGGNFLDDKQWLTTISQYDKEVGQWNKFRDDDYFRTWSPGKPFDQALSFHDLGIFV

SEQ ID NO: 12779 - protein, 79 aa, Homo Sapiens
MLKVSAVLCVCAAAWCSQSLAAAAAVAAAGGRSDGGNFLDDKQWLTTISQYDKEVGQWNKFRDDDYFRTWSPGKPFDQG

SEQ ID NO: 12780 - protein, 79 aa, Homo Sapiens; identical to SEQ ID NO: 12779

SEQ ID NO: 12781 - protein, 71 aa, Homo Sapiens
MLKVSAVLCVCAAAWCSQSLAAAAAVAAAGGRSDGGNFLDDKQWLTTISQYDKEVGQWNKFRDDERSRSRP

SEQ ID NO: 12782 - protein, 115 aa, Homo Sapiens
MLKVSAVLCVCAAAWCSQSLAAAAAVAAAGGRSDGGNFLDDKQWLTTISQYDKEVGQWNKFRDEVEDDYFRTWSPGKPFDQALDPAKDPCLKMKCSRHKVCIAQDSQTAVCISHR

SEQ ID NO: 12783 - protein, 115 aa, Homo Sapiens; identical to SEQ ID NO: 12782

SEQ ID NO: 12784 - protein, 436 aa, Homo Sapiens
MLKVSAVLCVCAAAWCSQSLAAAAAVAAAGGRSDGGNFLDDKQWLTTISQYDKEVGQWNKFRDEVEDDYFRTWSPGKPFDQALDPAKDPCLKMKCSRHKVCIAQDSQTAVCISHRRLTHRMKEAGVDHRQWRGPILSTCKQCPVVYPSPVCGSDGHTYSFQCKLEYQACVLGKQISVKCEGHCPCPSDKPTSTSRNVKRACSDLEFREVANRLRDWFKALHESGSQNKKTKTLLRPERSRFDTSILPICKDSLGWMFNRLDTNYDLLLDQSELRSIYLDKNEQCTKAFFNSCDTYKDSLISNNEWCYCFQRQQDPPCQTELSNIQKRQGVKKLLGQYIPLCDEDGYYKPTQCHGSVGQCWCVDRYGNEVMGSRINGVADCAIDFEISGDFASGDFHEWTDDEDDEDDIMNDEDEIEDDDEDEGDDDDGGDDHDVYI

SEQ ID NO: 12785 - protein, 436 aa, Homo Sapiens; identical to SEQ ID NO: 12784

SEQ ID NO: 12786 - protein, 436 aa, Homo Sapiens; identical to SEQ ID NO: 12784

SEQ ID NO: 12787 - protein, 436 aa, Homo Sapiens; identical to SEQ ID NO: 12784

SEQ ID NO: 12788 - protein, 122 aa, Homo Sapiens
MLKVSAVLCVCAAAWCSQSLAAAAAVAAAGGRSDGGNFLDDKQWLTTISQYDKEVGQWNKFRDEVEDDYFRTWSPGKPFDQALDPAKDPCLKMKCSRHKVCIAQDSQTAVCISHRRLTHSAN

SEQ ID NO: 12789 - protein, 122 aa, Homo Sapiens; identical to SEQ ID NO: 12788

SEQ ID NO: 12790 - protein, 64 aa, Homo Sapiens
MLKVSAVLCVCAAAWCSQSLAAAAAVAAAGGRSDGGNFLDDKQWLTTISQYDKEVGQWNKFRDL

SEQ ID NO: 12791 - protein, 83 aa, Homo Sapiens
NFLDDKQWLTTISQYDKEVGQWNKFRDDDYFRTWSPGKPFDQALDPAKDPCLKMKCSRHKVCIAQDSQTAVCISHRRLTHSAN

SEQ ID NO: 12792 - protein, 807 aa, Homo Sapiens
MRLSPAPLKLSRTPALLALALPLAAALAFSDETLDKVPKSEGYCSRILRAQGTRREGYTEFSLRVEGDPDFYKPGTSYRVTLSAAPPSYFRGFTLIALRENREGDKEEDHAGTFQIIDEEETQFMSNCPVAVTESTPRRRTRIQVFWIAPPAGTGCVILKASIVQKRIIYFQDEGSLTKKLCEQDSTFDGVTDKPILDCCACGTAKYRLTFYGNWSEKTHPKDYPRRANHWSAIIGGSHSKNYVLWEYGGYASEGVKQVAELGSPVKMEEEIRQQSDEVLTVIKAKAQWPAWQPLNVRAAPSAEFSVDRTRHLMSFLTMMGPSPDWNVGLSAEDLCTKECGWVQKVVQDLIPWDAGTDSGVTYESPNKPTIPQEKIRPLTSLDHPQSPFYDPEGGSITQVARVVIERIARKGEQCNIVPDNVDDIVADLAPEEKDEDDTPETCIYSNWSPWSACSSSTCDKGKRMRQRMLKAQLDLSVPCPDTQDFQPCMGPGCSDEDGSTCTMSEWITWSPCSISCGMGMRSRERYVKQFPEDGSVCTLPTEETEKCTVNEECSPSSCLMTEWGEWDECSATCGMGMKKRHRMIKMNPADGSMCKAETSQAEKCMMPECHTIPCLLSPWSEWSDCSVTCGKGMRTRQRMLKSLAELGDCNEDLEQVEKCMLPECPIDCELTEWSQWSECNKSCGKGHVIRTRMIQMEPQFGGAPCPETVQRKKCRIRKCLRNPSIQKLRWREARESRRSEQLKEESEGEQFPGCRMRPWTAWSECTKLCGGGIQERYMTVKKRFKSSQFTSCKDKKEIRACNVHPC

SEQ ID NO: 12793 - protein, 8 aa, Homo Sapiens
MENPSPAA

SEQ ID NO: 12794 - protein, 16 aa, Homo Sapiens
MENPSPAAALGKALCA

SEQ ID NO: 12795 - protein, 17 aa, Homo Sapiens
MENPSPAAALGKALCAL

SEQ ID NO: 12796 - protein, 24 aa, Homo Sapiens
MENPSPAAALGKALCALLLATLGA

SEQ ID NO: 12797 - protein, 61 aa, Homo Sapiens
MENPSPAAALGKALCALLLATLGAAGQPLGGESICSARALAKYSITFTGKWSQTAFPKQYP

SEQ ID NO: 12798 - protein, 64 aa, Homo Sapiens
MENPSPAAALGKALCALLLATLGAAGQPLGGESICSARALAKYSITFTGKWSQTAFPKQYPLFR

SEQ ID NO: 12799 - protein, 108 aa, Homo Sapiens
MENPSPAAALGKALCALLLATLGAAGQPLGGESICSARALAKYSITFTGKWSQTAFPKQYPLFRPPAQWSSLLGAAHSSDYSMWRKNQYVSNGLRDFAERGEAWALMK

SEQ ID NO: 12800 - protein, 331 aa, Homo Sapiens
MENPSPAAALGKALCALLLATLGAAGQPLGGESICSARALAKYSITFTGKWSQTAFPKQYPLFRPPAQWSSLLGAAHSSDYSMWRKNQYVSNGLRDFAERGEAWALMKEIEAAGEALQSVHAVFSAPAVPSGTGQTSAELEVQRRHSLVSFVVRIVPSPDWFVGVDSLDLCDGDRWREQAALDLYPYDAGTDSGFTFSSPNFATIPQDTVTEITSSSPSHPANSFYYPRLKALPPIARVTLVRLRQSPRAFIPPAPVLPSRDNEIVDSASVPETPLDCEVSLWSSWGLCGGHCGRLGTKSRTRYVRVQPANNGSPCPELEEEAECVPDNCV

SEQ ID NO: 12801 - protein, 331 aa, Homo Sapiens; identical to SEQ ID NO: 12800

SEQ ID NO: 12802 - protein, 331 aa, Homo Sapiens; identical to SEQ ID NO: 12800

SEQ ID NO: 12803 - protein, 314 aa, Homo Sapiens
MRIAVICFCLLGITCAIPVKQADSGSSEEKQLYNKYPDAVATWLNPDPSQKQNLLAPQNAVSSEETNDFKQETLPSKSNESHDHMDDMDDEDDDDHVDSQDSIDSNDSDDVDDTDDSHQSDESHHSDESDELVTDFPTDLPATEVFTPVVPTVDTYDGRGDSVVYGLRSKSKKFRRPDIQYPDATDEDITSHMESEELNGAYKAIPVAQDLNAPSDWDSRGKDSYETSQLDDQSAETHSHKQSRLYKRKANDESNEHSDVIDSQELSKVSREFHSHEFHSHEDMLVVDPKSKEEDKHLKFRISHELDSASSEVN

SEQ ID NO: 12804 - protein, 292 aa, Homo Sapiens
MRIAVICFCLLGITCAIPVKQADSGSSEEKQLYNKYPDAVATWLNPDPSQKQNLLAPQNAVSSEETNDFKQETLPSKSNESHDHMDDMDDEDDDSHQSDESHHSDESDELVTDFPTDLPATEVFTPVVPTVDTYDGRGDSVVYGLRSKSKKFRRPDIQYPDATDEDITSHMESEELNGAYKAIPVAQDLNAPSDWDSRGKDSYETSQLDDQSAETHSHKQSRLYKRKANDESNEHSDVIDSQELSKVSREFHSHEFHSHEDMLVVDPKSKEEDKHLKFRISHELDSASSEVN

SEQ ID NO: 12805 - protein, 300 aa, Homo Sapiens
MRIAVICFCLLGITCAIPVKQADSGSSEEKQLYNKYPDAVATWLNPDPSQKQNLLAPQTLPSKSNESHDHMDDMDDEDDDDHVDSQDSIDSNDSDDVDDTDDSHQSDESHHSDESDELVTDFPTDLPATEVFTPVVPTVDTYDGRGDSVVYGLRSKSKKFRRPDIQYPDATDEDITSHMESEELNGAYKAIPVAQDLNAPSDWDSRGKDSYETSQLDDQSAETHSHKQSRLYKRKANDESNEHSDVIDSQELSKVSREFHSHEFHSHEDMLVVDPKSKEEDKHLKFRISHELDSASSEVN

SEQ ID NO: 12806 - protein, 287 aa, Homo Sapiens
MRIAVICFCLLGITCAIPVKQADSGSSEEKQNAVSSEETNDFKQETLPSKSNESHDHMDDMDDEDDDDHVDSQDSIDSNDSDDVDDTDDSHQSDESHHSDESDELVTDFPTDLPATEVFTPVVPTVDTYDGRGDSVVYGLRSKSKKFRRPDIQYPDATDEDITSHMESEELNGAYKAIPVAQDLNAPSDWDSRGKDSYETSQLDDQSAETHSHKQSRLYKRKANDESNEHSDVIDSQELSKVSREFHSHEFHSHEDMLVVDPKSKEEDKHLKFRISHELDSASSEVN

SEQ ID NO: 12807 - protein, 241 aa, Homo Sapiens
MRIAVICFCLLGITCAIPVKQADSGSSEEKQTLPSKSNESHDHMDDMDDEDDDDHVDSQDSIDSNDSDDVDDTDDSHQSDESHHSDESDELVTDFPTDLPATEVFTPVVPTVDTYDGRGDSVVYGLRSKSKKFRRPDIQYPDATDEDITSHMESEELNGAYKAIPVAQDLNAPSDWDSRGKDSYETSQLDDQSAETHSHKQSRLYKRKANDESNEHSDVIDSQELSKVSREFHSHEFHSHE

SEQ ID NO: 12808 - protein, 211 aa, Homo Sapiens
MISRMEKMTMMMKILIMFALGMNYWSCSGFPVYDYDPSSLRDALSASVVKVNSQSLSPYLFRAFRSSLKRVEVLDENNLVMNLEFSIRETTCRKDSGEDPATCAFQRDYYVSTAVCRSTVKVSAQQVQGVHARCSWSSSTSESYSSEEMIFGDMLGSHKWRNNYLFGLISDESISEQFYDRSLGIMRRVLPPGNRRYPNHRHRARINTDFE

SEQ ID NO: 12809 - protein, 211 aa, Homo Sapiens; identical to SEQ ID NO: 12808

SEQ ID NO: 12810 - protein, 131 aa, Homo Sapiens
MNLEFSIRETTCRKDSGEDPATCAFQRDYYVSTAVCRSTVKVSAQQVQGVHARCSWSSSTSESYSSEEMIFGDMLGSHKWRNNYLFGLISDESISEQFYDRSLGIMRRVLPPGNRRYPNHRHRARINTDFE

SEQ ID NO: 12811 - protein, 151 aa, Homo Sapiens
MNWAPATCWALLLAAAFLCDSGAAKGGRGGARGSARGGVRGGARGASRVRVRPAQRYGAPGSSLRVAAAGAAAGAAAGAAAGLAAGSGWRRAAGPGERGLEDEEDGVPGGNGTGPGIYSYRAWTSGAGPTRGPRLCLVLGGALGALGLLRP

SEQ ID NO: 12812 - protein, 442 aa, Homo Sapiens
MRRTRRPRFVLMNKMDDLNLHYRFLNWRRRIREIREVRAFRYQERFKHILVDGDTLSYHGNSGEVGCYVASRPLTKDSNYFEVSIVDSGVRGTIAVGLVPQYYSLDHQPGWLPDSVAYHADDGKLYNGRAKGRQFGSKCNSGDRIGCGIEPVSFDVQTAQIFFTKNGKRVGSTIMPMSPDGLFPAVGMHSLGEEVRLHLNAELGREDDSVMMVDSYEDEWGRLHDVRVCGTLLEYLGKGKSIVDVGLAQARHPLSTRSHYFEVEIVDPGEKCYIALGLARKDYPKNRHPGWSRGSVAYHADDGKIFHGSGVGDPFGPRCYKGDIMGCGIMFPRDYILDSEGDSDDSCDTVILSPTARAVRNVRNVMYLHQEGEEEEEEEEEEEDGEEIEPEHEGRKVVVFFTRNGKIIGKKDAVVPSGGFFPTIGMLSCGEKVKVDLHPLSG

SEQ ID NO: 12813 - protein, 165 aa, Homo Sapiens
MRRTRRPRFVLMNKMDDLNLHYRFLNWRRRIREIREVRAFRYQERFKHILVDGDTLSYHGNSGEVGCYVASRPLTKDSNYFEVSIVDSGVRGTIAVGLVPQYYSLDHQPGWLPDSVAYHADDGKWALPSCPCPQMDCSQQWACTPWVRRCGCTSTLSWAVRTTAS

SEQ ID NO: 12814 - protein, 479 aa, Homo Sapiens
MRRTRRPRVLLCQPGWNVVAQSELTAALTCQTQAIFSLLSSWDYRFVLMNKMDDLNLHYRFLNWRRRIREIREVRAFRYQERFKHILVDGDTLSYHGNSGEVGCYVASRPLTKDSNYFEVSIVDSGVRGTIAVGLVPQYYSLDHQPGWLPDSVAYHADDGKLYNGRAKGRQFGSKCNSGDRIGCGIEPVSFDVQTAQIFFTKNGKRVGSTIMPMSPDGLFPAVGMHSLGEEVRLHLNAELGREDDSVMMVDSYEDEWGRLHDVRVCGTLLEYLGKGKSIVDVGLAQARHPLSTRSHYFEVEIVDPGEKCYIALGLARKDYPKNRHPGWSRGSVAYHADDGKIFHGSGVGDPFGPRCYKGDIMGCGIMFPRDYILDSEGDSDDSCDTVILSPTARAVRNVRNVMYLHQEGEEEEEEEEEEEDGEEIEPEHEGRKVVVFFTRNGKIIGKKDAVVPSGGFFPTIGMLSCGEKVKVDLHPLSG

SEQ ID NO: 12815 - protein, 60 aa, Homo Sapiens
  misc_feature (1)..(1): Xaa can be any naturally occurring amino acid
XDGEEIEPEHEGRKVVVFFTRNGKIIGKKDAVVPSGGFFPTIGMLSCGEKVKVDLHPLSG

SEQ ID NO: 12816 - protein, 207 aa, Homo Sapiens
MALLFARSLRLCRWGAKRLGVASTEAQRGVSFKLEEKTAHSSLALFRDDTGVKYGLVGLEPTKVALNVERFREWAVVLADTAVTSGRHYWEVTVKRSQQFRIGVADVDMSRDSCIGVDDRSWVFTYAQRKWYTMLANEKAPVEGIGQPEKVGLLLEYEAQKLSLVDVSQVSVVHTLQTDFRGPVVPAFALWDGELLTHSGLEVPEGL

SEQ ID NO: 12817 - protein, 59 aa, Homo Sapiens
MIVLGWMFFVGLVCYMGTFPELMPPTLKWQERWPVQESKTQLRRRALGEDLLQNHVEGI

SEQ ID NO: 12818 - protein, 59 aa, Homo Sapiens; identical to SEQ ID NO: 12817

SEQ ID NO: 12819 - protein, 56 aa, Homo Sapiens
MIVLGWMFFVGLVCYMGTFPELMPPTLKWQERWPVQESKTQLRRRALGLALPPRLE

SEQ ID NO: 12820 - protein, 76 aa, Homo Sapiens
MIVLGWMFFVGLVCYMGTFPELMPPTLKWQERWPVQESKTQLRRRALGTMWKGYKYPPGGTPVEVSKDDPGEVMQL

SEQ ID NO: 12821 - protein, 40 aa, Homo Sapiens
MIVVLWMLLIAGTMWKGYKYPPGGTPVEVSKDDPGEVMQL

SEQ ID NO: 12822 - protein, 40 aa, Homo Sapiens; identical to SEQ ID NO: 12821

SEQ ID NO: 12823 - protein, 116 aa, Homo Sapiens
MKGLRSLAATTLALFLVFVFLGNSSCAPQRLLERRNWTPQAMLYLKGAQGRRFISDQSRRKDLSDRPLPERRSPNPQLLTIPEAATILLASLQKSPEDEEKNFDQTRFLEDSLLNW

SEQ ID NO: 12824 - protein, 36 aa, Homo Sapiens
MLYLKGAQGRRFISDQSRRKDLSDRPLPDEAQIPNY

SEQ ID NO: 12825 - protein, 158 aa, Homo Sapiens
MMQKLLKCSRLVLALALILVLESSVQGYPTRRARYQWVRCNPDSNSANCLEEKGPMFELLPGESNKIPRLRTDLFPKTRIQDLNRIFPLSEDYSGSGFGSGSGSGSGSGSGFLTEMEQDYQLVDESDAFHDNLRSLDRNLPSDSQDLGQHGLEEDFML

SEQ ID NO: 12826 - protein, 431 aa, Homo Sapiens
MLNEDKPSDDYSAVLQRLRKIYHSSIKPLEQSYKYNELRQHEITDGEITSKPMVLFLGPWSVGKSTMINYLLGLENTRYQLYTGAEPTTSEFTVLMHGPKLKTIEGIVMAADSARSFSPLEKFGQNFLEKLIGIEVPHKLLERVTFVDTPGIIENRKQQERGYPFNDVCQWFIDRADLIFVVFDPTKLDVGLELEMLFRQLKGRESQIRIILNKADNLATQMLMRVYGALFWSLAPLINVTEPPRVYVSSFWPQEYKPDTHQELFLQEEISLLEDLNQVIENRLENKIAFIRQHAIRVRIHALLVDRYLQTYKDKMTFFSDGELVFKDIVEDPDKFYIFKTILAKTNVSKFDLPNREAYKDFFGINPISSFKLLSQQCSYMGGCFLEKIERAITQELPGLLGSLGLGKNPGALNCDKTGCSETPKNRYRKH

SEQ ID NO: 12827 - protein, 473 aa, Homo Sapiens
MRALVLLGCLLASLLFSGQAEETEDANEEAPLRDRSHIEKTLMLNEDKPSDDYSAVLQRLRKIYHSSIKPLEQSYKYNELRQHEITDGEITSKPMVLFLGPWSVGKSTMINYLLGLENTRYQLYTGAEPTTSEFTVLMHGPKLKTIEGIVMAADSARSFSPLEKFGQNFLEKLIGIEVPHKLLERVTFVDTPGIIENRKQQERGYPFNDVCQWFIDRADLIFVVFDPTKLDVGLELEMLFRQLKGRESQIRIILNKADNLATQMLMRVYGALFWSLAPLINVTEPPRVYVSSFWPQEYKPDTHQELFLQEEISLLEDLNQVIENRLENKIAFIRQHAIRVRIHALLVDRYLQTYKDKMTFFSDGELVFKDIVEDPDKFYIFKTILAKTNVSKFDLPNREAYKDFFGINPISSFKLLSQQCSYMGGCFLEKIERAITQELPGLLGSLGLGKNPGALNCDKTGCSETPKNRYRKH

SEQ ID NO: 12828 - protein, 486 aa, Homo Sapiens
MRALVLLGCLLASLLFSGQAELQVSASGGTEDVGNLLENHFSAGDASLEEKERALYADTAPQDKKLLLHYPDGREAESPKKTPASAASAGPDPEASLSNASATESPPPGERDDRDAAGPGEEKNGPPVASALPPGGAKGPVEEEWPEPSSGEGQGEEETGFGLPTEGTASGEAGGQAGGHELPEEVQEVQGDSLVQGAVAGTAEPKAEGASPHSEGDGVGPLNAEAEGSPGPGEEPAVPEGAPDVAAVGGESEPDIDTQASEGTEDQGEPGPAAEASAEPGGAQSVKAGDTEENQSPEMTEEDADEASSEEESGDGSGSEEEGGVPSEEESEEDSGDGASSEEAEGASEEATEPQEAGEPQEAREPQEGGDLQEAEESQEGGDPQEAEEPQEGGAPQEGGEPQEGGDPQEAREPQEAREPQEGAELPEATGTTSHRDRGAQPGPEELNTESMGSETLDMKAEEPEEGHQGEGESHHCCPGRDGGCK

SEQ ID NO: 12829 - protein, 56 aa, Homo Sapiens
MAYSNLLRANMDGLKKRDKKNKTKKTKAAAAAAAAAPAAAATAPTTAATTAATAAQ

SEQ ID NO: 12830 - protein, 56 aa, Homo Sapiens; identical to SEQ ID NO: 12829

SEQ ID NO: 12831 - protein, 136 aa, Homo Sapiens
MVLLESEQFLTELTRLFQKCRTSGSVYITLKKYDGRTKPIPKKGTVEGFEPADNKCLLRATDGKKKISTVVSSKEVNKFQMAYSNLLRANMDGLKKRDKKNKTKKTKAAAAAAAAAPAAAATAPTTAATTAATAAQ

SEQ ID NO: 12832 - protein, 115 aa, Homo Sapiens
MVLLESEQFLTELTRLFQKCRTSGSVYITLKKYDGRTKPIPKKGTVEGFEPADNKCLLRATDGKKKISTVVSSKEVNKFQMVSFGCSLCFPSQGKSQYDSEHWVRLILGFTALRR

SEQ ID NO: 12833 - protein, 444 aa, Homo Sapiens
MGSPAHRPALLLLLPPLLLLLLLRVPPSRSFPDTPWCSPIKVKYGDVYCRAPQGGYYKTALGTRCDIRCQKGYELHGSSLLICQSNKRWSDKVICKQKRCPTLAMPANGGFKCVDGAYFNSRCEYYCSPGYTLKGERTVTCMDNKAWSGRPASCVDMEPPRIKCPSVKERIAEPNKLTVRVSWETPEGRDTADGILTDVILKGLPPGSNFPEGDHKIQYTVYDRAENKGTCKFRVKVRVKRCGKLNAPENGYMKCSSDGDNYGATCEFSCIGGYELQGSPARVCQSNLAWSGTEPTCAAMNVNVGVRTAAALLDQFYEKRRLLIVSTPTARNLLYRLQLGMLQQAQCGLDLRHITVVELVGVFPTLIGRIGAKIMPPALALQLRLLLRIPLYSFSMVLVDKHGMDKERYVSLVMPVALFNLIDTFPLRKEEMVLQAEMSQTCNT

SEQ ID NO: 12834 - protein, 405 aa, Homo Sapiens
MGSPAHRPALLLLLPPLLLLLLLRVPPSRSFPGSGDSPLEDDEVGYSHPRYKDTPWCSPIKVKYGDVYCRAPQGGYYKTALGTRCDIRCQKGYELHGSSLLICQSNKRWSDKVICKHMEPPRIKCPSVKERIAEPNKLTVRVSWETPEGRDTADGILTDVILKGLPPGSNFPEGDHKIQYTVYDRAENKGTCKFRVKVRVKRCGKLNAPENGYMKCSSDGDNYGATCEFSCIGGYELQGSPARVCQSNLAWSGTEPTCAAMNVNVGVRTAAALLDQFYEKRRLLIVSTPTARNLLYRLQLGMLQQAQCGLDLRHITVVELVGVFPTLIGRIGAKIMPPALALQLRLLLRIPLYSFSMVLVDKHGMDKERYVSLVMPVALFNLIDTFPLRKEEMVLQAEMSQTCNT

SEQ ID NO: 12835 - protein, 464 aa, Homo Sapiens
MGSPAHRPALLLLLPPLLLLLLLRVPPSRSFPGSGDSPLEDDEVGYSHPRYKDTPWCSPIKVKYGDVYCRAPQGGYYKTALGTRCDIRCQKGYELHGSSLLICQSNKRWSDKVICKQKRCPTLAMPANGGFKCVDGAYFNSRCEYYCSPGYTLKGERTVTCMDNKAWSGRPASCVDMEPPRIKCPSVKERIAEPNKLTVRVSWETPEGRDTADGILTDVILKGLPPGSNFPEGDHKIQYTVYDRAENKGTCKFRVKVRVKRCGKLNAPENGYMKCSSDGDNYGATCEFSCIGGYELQGSPARVCQSNLAWSGTEPTCAAMNVNVGVRTAAALLDQFYEKRRLLIVSTPTARNLLYRLQLGMLQQAQCGLDLRHITVVELVGVFPTLIGRIGAKIMPPALALQLRLLLRIPLYSFSMVLVDKHGMDKERYVSLVMPVALFNLIDTFPLRKEEMVLQAEMSQTCNT

SEQ ID NO: 12836 - protein, 379 aa, Homo Sapiens
MGSPAHRPALLLLLPPLLLLLLLRVPPSRSFPGSGDSPLEDDEVGYSHPRYKDTPWCSPIKVKYGDVYCRAPQGGYYKTALGTRCDIRCQKGYELHGSSLLICQSNKRWSDKVICKQKRCPTLAMPANGGFKCVDGAYFNSRCEYYCSPGYTLKGERTVTCMDNKAWSGRPASCVDMEPPRIKCPSVKERIAEPNKLTVRVSWETPEGRDTADGILTDVILKGLPPGSNFPEGDHKIQYTVYDRAENKGTCKFRVKVRVKRCGKLNAPENGYMKCSSDGDNYGATCEFSCIGGYELQGSPARVCQSNLAWSGTEPTCAAMNVNVGVRTAAALLDQFYEKRRLLIVSTPTARNLLYRLQLGMLQAVAANPTLLLQYGASG

SEQ ID NO: 12837 - protein, 62 aa, Homo Sapiens
CAPMKINVNVNSAAGLLDQFYEKQRLLIISAPDPSNRYYKMQISMLQAISAPHSLLLQHGVD

SEQ ID NO: 12838 - protein, 312 aa, Homo Sapiens
MASQLTQRGALFLLFFLTPAVTPTWYAGSGYYPDESYNEVYAEEVPQAPALDYRACLSSIATVPRWCYTLNIQDGEATCYSPKGGNYHSSLGTRCELSCDRGFRLIGRRSVQCLPSRRWSGTAYCRQMRCHALPFITSGTYTCTNGVLLDSRCDYSCSSGYHLEGDRSRICMEDGRWSGGEPVCVDIDPPKIRCPHSREKMAEPEKLTARVYWDPPLVKDSADGTITRVTLRGPEPGSHFPEGEHVIRYTAYDRAYNRASCKFIVKVQVRRCPTLKPPQHGYLTCTSAGDNYGATCEYHCDGGYDRQGTPSR

SEQ ID NO: 12839 - protein, 224 aa, Homo Sapiens
MASQLTQRGALFLLFFLTPAVTPTWYAGSGYYPDESYNEVYAEEVPQAPALDYRVPRWCYTLNIQDGEATCYSPKGGNYHSSLGTRCELSCDRGFRLIGRRSVQCLPSRRWSGTAYCRQMRCHALPFITSGTYTCTNGVLLDSRCDYSCSSGYHLEGDRSRICMEDGRWSGGEPVCVDIDPPKIRCPHSREKMAEPEKLTARVYWDPPLVKDSADGTITRVTLR

SEQ ID NO: 12840 - protein, 465 aa, Homo Sapiens
MASQLTQRGALFLLFFLTPAVTPTWYAGSGYYPDESYNEVYAEEVPQAPALDYRVPRWCYTLNIQDGEATCYSPKGGNYHSSLGTRCELSCDRGFRLIGRRSVQCLPSRRWSGTAYCRQMRCHALPFITSGTYTCTNGVLLDSRCDYSCSSGYHLEGDRSRICMEDGRWSGGEPVCVDIDPPKIRCPHSREKMAEPEKLTARVYWDPPLVKDSADGTITRVTLRGPEPGSHFPEGEHVIRYTAYDRAYNRASCKFIVKVQVRRCPTLKPPQHGYLTCTSAGDNYGATCEYHCDGGYDRQGTPSRVCQSSRQWSGSPPICAPMKINVNVNSAAGLLDQFYEKQRLLIISAPDPSNRYYKMQISMLQQSTCGLDLRHVTIIELVGQPPQEVGRIREQQLSANIIEELRQFQRLTRSYFNMVLIDKQGIDRDRYMEPVTPEEIFTFIDDYLLSNQELTQRREQRDICE

SEQ ID NO: 12841 - protein, 575 aa, Homo Sapiens
MHKEAEMLIGPQLDEKRWGWRLGDGSAAPPFLPQALSFLLLLPLASALQPTPLPFQELRLVGGPSRCRGRLEVMHGGSWGSVCDDDWDVVDANVVCRQLGCGLALPVPRPLAFGQGRGPILLDNVECRGQEAALSECGSRGWGVHNCFHYEDVAVLCDEFLPTQPPTRKMLTSRAPPTTLPNGKSEGSVRLVGGANLCQGRVEILHSGLWGTVCDDDWGLPDAAVVCRQLGCGAAMAATTNAFFGYGTGHILLDNVHCEGGEPRLAACQSLGWGVHNCGHHEDAGALCAGLGPPTLTALPSSATREDWAWQTDPSATGVGPQPSRETALLTTAAWAAGKKSGRLRLVGGPGPCRGRVEVLHAGGWGTVCDDDWDFADARVACREAGCGPALGATGLGHFGYGRGPVLLDNVGCAGTEARLSDCFHLGWGQHNCGHHEDAGALCAGPEELGLQVQQDGSETTRVPTPRPRDGHLRLVNGAHRCEGRVELYLGQRWGTVCDDAWDLRAAGVLCRQLGCGQALAAPGEAHFGPGRGPILLDNVKCRGEESALLLCSHIRWDAHNCDHSEDASVLCQPS

SEQ ID NO: 12842 - protein, 118 aa, Homo Sapiens
DAGAVCDGMPLGYVPPTAPTDSNNSTPREAASRPPSTMTSQAPGTAGVSPPPASPTVLWEPGPEAGPPGLDSISDPFSWSWIPGLGRDRDAWLPGELATKPSASVTASVLEKTTTKAP

SEQ ID NO: 12843 - protein, 90 aa, Homo Sapiens
MRVLACLLAALVGIQAVERLRLADGPHGCAGRLEVWHGGRWGTVCDDGWDLRDAAVACRQLGCGGALAAPGGAFFGEGAGPVWLSELACR

SEQ ID NO: 12844 - protein, 1573 aa, Homo Sapiens
MRVLACLLAALVGIQAVERLRLADGPHGCAGRLEVWHGGRWGTVCDDGWDLRDAAVACRQLGCGGALAAPGGAFFGEGAGPVWLSELACRGNEGQLGLCHHRGWKAHICSHEEDAGVVCAGQRVANSRDDSTSPLDGAPWPGLLLELSPSTEEPLVTHAPRPAGNPQNASRKKSPRPKQAKSTRAPLLTTGAPRQERLRLVSGPHRCAGRLEVWHGGRWGTVCDDGWDLRDAAVACRELGCGGALAAPGGARFGPGAGPVWMDDVGCGGGEQALRDCPRSPWGRSNCDHSEDAGLVCTGPAPRLRLADGPHGCAGRLEVWHGGRWGSVCDDAWDLRDAAVACRELGCGGALAAPGGAFFGEGSGPIILDDLRCRGNETALRFCPARPWGQHDCHHREDAGAVCDGMPLGYVPPTAPTDSNNSTPREAASRPPSTMTSQAPGTAGVSPPPASPTVLWEPGPEAGSPQLRLVAGPSKCSGRLEVWHDQRWGTVCDDSWDMRDSAVVCRELGCGGPQQPDPAAGRFGWGAGPIWLDDVGCVGTEASLSDCPAAPWGKHNCAHNEDVGVTCTGPPGLDSISDPFSWSWIPGLGRDRDAWLPGELATKPSASVTASVLEKTTTKAPGKMPKSTKKWVTKNAKRPTTQPPVMPTTKHSRAQSPPDLTSQTTAALTTEASRRPTSEFTRRPTTEAPQRWTSHTTATLTPQAPRERTTKTMAMLTTQGPQEMTSESTIKSIPQASLEPSAEIPEGSPESPKDPAPSPSVSTTGESGLFRVRLADGPNRCAGRLEVWHAGRWGTVCDDNWDLRDATVACWELGCGKVRPRVGKTHYGPGTGPIWLDDMGCKGSEASLSDCPSGAWGKHNCDHEEDVGLTCTGYTDYDDYPPWTWDPTSREDLAKGTTTAGVPGHTLPWRTTRRPGSSSPAIRRLPDTGSKDGYKLPWTWDTPSGRGLAEGTPTAGKLGPTLGAGTTRSPGSPPTLRVHGDTGSPRKPWPERRPPRPAATRTAPPTPSPGPSASPGPPGPALTSDSSRELTPHSALTSEATSDAPDTSPPTPDPASRTNPDLILTSPDFALSTPDSSVVPALTPEPSPTPLPTLPKELTSDPSTPSEVTSLSPTSEQVPESDTTPDLDTTPYSSTVSEYSRSPDPSPSPHPTTTPDPTMAPDPITTLNPTVTPHFPTTPHPTTTPHPTTITHSTMIPDPTTTPQPFTTITHSTMIPDPTTTPQPFTTMQPTTTPHSTTPHPTTTPHPTTITHSTMIPDPTTTPQPFTTMQPTTMPHPTTTPHPTTTPHPTTTPHPTTTPHPTMTPDPTTTPYPTTTPDPTTTPHPTTPDPSSTPVITTVSLPTSLGTELSSPTLAPTVKPSLHPQLTFTAPAPHTSTSQIPTLEPSPALESSPSRSSTATSMDPLSTEDFKPPRSQSPNLTPPPTHTPHSASDLTVSPDPLLSPTAHPLDHPPLDPLTLGPTPGQSPGPHGPCVAPTPPVRVMACEPPALVELVAAVRDVGGQLQRLTQVVEQERQERQALLLGLTQLVEAARGLGQLGEAVKRLAEMAWTTSMPAPTTTTPEEEERPLRGDV

SEQ ID NO: 12845 - protein, 951 aa, Homo Sapiens
MRVLACLLAALVGIQAVERLRLADGPHGCAGRLEVWHGGRWGTVCDDGWDLRDAAVACRQLGCGGALAAPGGAFFGEGAGPVWLSELACRGNEGQLGLCHHRGWKAHICSHEEDAGVVCAGQRVANSRDDSTSPLDGAPWPGLLLELSPSTEEPLVTHAPRPAGNPQNASRKKSPRPKQAKSTRAPLLTTGAPRQERLRLVSGPHRCAGRLEVWHGGRWGTVCDDGWDLRDAAVACRELGCGGALAAPGGARFGPGAGPVWMDDVGCGGGEQALRDCPRSPWGRSNCDHSEDAGLVCTGPAPRLRLADGPHGCAGRLEVWHGGRWGSVCDDAWDLRDAAVACRELGCGGALAAPGGAFFGEGSGPIILDDLRCRGNETALRFCPARPWGQHDCHHREDAGAVCDGMPLGYVPPTAPTDSNNSTPREAASRPPSTMTSQAPGTAGVSPPPASPTVLWEPGPEAGSPQLRLVAGPSKCSGRLEVWHDQRWGTVCDDSWDMRDSAVVCRELGCGGPQQPDPAAGRFGWGAGPIWLDDVGCVGTEASLSDCPAAPWGKHNCAHNEDVGVTCTGPPGLDSISDPFSWSWIPGLGRDRDAWLPGELATKPSASVTASVLEKTTTKAPGKMPKSTKKWVTKNAKRPTTQPPVMPTTKHSRAQSPPDLTSQTTAALTTEASRRPTSEFTRRPTTEAPQRWTSHTTATLTPQAPRERTTKTMAMLTTQGPQEMTSESTIKSIPQASLEPSAEIPEGSPESPKDPAPSPSVSTTGESGLFRVRLADGPNRCAGRLEVWHAGRWGTVCDDNWDLRDATVACWELGCGKVRPRVGKTHYGPGTGPIWLDDMGCKGSEASLSDCPSGAWGKHNCDHEEDVGLTCTGYTDYDDYPPWTWDPTSREDLAKGTTTAGVPGHTLPWRTTRRPGSSSPAIRRLPDTEPEAGAPRGDAPRSRTARVAAPP

SEQ ID NO: 12846 - protein, 5150 aa, Homo Sapiens
MLLPALLFGMAWALADGRWCEWTETIRVEEEVAPRQEDLVPCASLDHYSRLGWRLDLPWSGRSGLTRSPAPGLCPIYKPPETRPAKWNRTVRTCCPGWGGAHCTEALAKASPEGHCFAMWQCQLQAGSANASAGSLEECCARPWGQSWWDGSSQACRSCSSRHLPGSASSPALLQPLAGAVGQLWSQHQRPSATCASWSGFHYRTFDGRHYHFLGRCTYLLAGAADSTWAVHLTPGDRCPQPGHCQRVTMGPEEVLIQAGNVSVKGQLVPEGQSWLLHGLSLQWLGDWLVLSGGLGVVVRLDRTGSISISVDHELWGQTQGLCGLYNGWPEDDFMEPGGGLAMLAATFGNSWRLPGSESGCLDAVEVAQGCDSPLGLIDADVEPGHLRAEAQDVCHQLLEGPFGQCHAQVSPAEYHEACLFAYCAGAMAGSGQEGRQQAVCATFASYVQACARRHIHIRWRKPGFCERLCPGGQLYSDCVSLCPPSCEAVGQGEEESCREECVSGCECPRGLFWNGTLCVPAAHCPCYYCRQRYVPGDTVRQLCNPCVCRDGRWHCAQALCPAECAVGGDGHYLTFDGRSYSFWGGQGCRYSLVQDYVKGQLLILLEHGACDAGSCLHAISVSLEDTHIQLRDSGAVLVNGQDVGLPWIGAEGLSVRRASSAFLLLRWPGAQVLWGLSDPVAYITLDPRHAHQVQGLCGTFTQNQQDDFLTPAGDVETSIAAFASKFQVAGKGRCPSEDSALLSPCTTHSQRHAFAEAACAILHSSVFQECHRLVDKEPFYLRCLAAVCGCDPGSDCLCPVLSAYARRCAQEGASPPWRNQTLCPVMCPGGQEYRECAPACGQHCGKPEDCGELGSCVAGCNCPLGLLWDPEGQCVPPSLCPCQLGARRYAPGSATMKECNRCICQERGLWNCTARHCPSQAFCPRELVYAPGACLLTCDSPSANHSCPAGSTDGCVCPPGTVLLDERCVPPDLCPCRHSGQWYLPNATIQEDCNVCVCRGRQWHCTGQRRSGRCQASGAPHYVTFDGLAFTYPGACEYLLVREASGLFTVSAQNLPCGASGLTCTKALAVRLEGTVVHMLRGRAVTVNGVSVTPPKVYTGPGLSLRRAGLFLLLSTHLGLTLLWDGGTRVLVQLSPQFRGRVAGLCGDFDGDASNDLRSRQGVLEPTAELAAHSWRLSPLCPEPGDLPHPCTMNTHRAGWARARCGALLQPLFTLCHAEVPPQQHYEWCLYDACGCDSGGDCECLCSAIATYADECARHGHHVRWRSQELCSLQCEGGQVYEACGPTCPPTCHEQHPEPGWHCQVVACVEGCFCPEGTLLHGGACLEPASCPCEWGRNSFPPGSVLQKDCGNCTCQEGQWHCGGDGGHCEELVPACAEGEALCQENGHCVPHGWLCDNQDDCGDGSDEEGCAAPGCGEGQMTCSSGHCLPLALLCDRQDDCGDGTDEPSYPCPQGLLACADGRCLPPALLCDGHPDCLDAADEESCLGQVTCVPGEVSCVDGTCLGAIQLCDGVWDCPDGADEGPGHCPLPSLPTPPASTLPGPSPGSLDTASSPLASASPAPPCGPFEFRCGSGECTPRGWRCDQEEDCADGSDERGCGGPCAPHHAPCARGPHCVSPEQLCDGVRQCPDGSDEGPDACGGLPALGGPNRTGLPCPEYTCPNGTCIGFQLVCDGQPDCGRPGQVGPSPEEQGCGAWGPWSPWGPCSRTCGPWGQGRSRRCSPLGLLVLQNCPGPEHQSQACFTAACPVDGEWSTWSPWSVCSEPCRGTMTRQRQCHSPQNGGRTCAALPGGLHSTRQTKPCPQDGCPNATCSGELMFQPCAPCPLTCDDISGQVTCPPDWPCGSPGCWCPEGQVLGSEGWCVWPRQCPCLVDGARYWPGQRIKADCQLCICQDGRPRRCRLNPDCAVDCGWSSWSPWAKCLGPCGSQSIQWSFRSSNNPRPSGRGRQCRGIHRKARRCQTEPCEGCEHQGQVHRVGERWHGGPCRVCQCLHNLTAHCSPYCPLGSCPQGWVLVEGTGESCCHCALPGENQTVQPMATPAAAPAPSPQIRFPLATYILPPSGDPCYSPLGLAGLAEGSLHASSQQLEHPTQAALLGAPTQGPSPQGWHAGGDAYAKWHTRPHYLQLDLLQPRNLTGILVPETGSSNAYASSFSLQFSSNGLHWHDYRDLLPGILPLPKLFPRNWDDLDPAVWTFGRMVQARFVRVWPHDVHHSDVPLQVELLGCEPGSPPAPLCPGVGLRCASGECVLRGGPCDGVLDCEDGSDEEGCVLLPEGTGRFHSTAKTLALSSAQPGQLLHWPREGLAETEHWPPGQESPTSPTETRPVSPGPASGVPHHGESVQMVTTTPIPQMEARTLPPGMAAVTVVPPHPVTPATPAGQSVAPGPFPPVQCGPGQTPCEVLGCVEQAQVCDGREDCLDGSDERHCARNLLMWLPSLPALWAASTVPFMMPTMALPGLPASRALCSPSQLSCGSGECLSAERRCDLRPDCQDGSDEDGCVDCVLAPWSVWSSCSRSCGLGLTFQRQELLRPPLPGGSCPRDRFRSQSCFVQACPVAGAWAMWEAWGPCSVSCGGGHQSRQRSCVDPPPKNGGAPCPGASQERAPCGLQPCSGGTDCELGRVYVSADLCQKGLVPPCPPSCLDPKANRSCSGHCVEGCRCPPGLLLHDTRCLPLSECPCLVGEELKWPGVSFLLGNCSQCVCEKGELLCQPGGCPLPCGWSAWSSWAPCDRSCGSGVRARFRSPSNPPAAWGGAPCEGDRQELQGCHTVCGTEVFGWTPWTSWSSCSQSCLAPGGGPGWRSRSRLCPSPGDSSCPGDATQEEPCSPPVCPVPSIWGLWAPWSTCSAPCDGGIQTRGRSCSSLAPGDTTCPGPHSQTRDCNTQPCTAQCPENMLFRSAEQCHQEGGPCPRLCLTQGPGIECTGFCAPGCTCPPGLFLHNASCLPRSQCPCQLHGQLYASGAMARLDSCNNCTCVSGKMACTSERCPVACGWSPWTLWSLCSCSCNVGIRRRFRAGTAPPAAFGGAECQGPTMEAEFCSLRPCPGPGGEWGPWSPCSVPCGGGYRNRTRGSSRSLMEFSTCGLQPCAGPVPGMCPRDKQWLDCAQGPASCAELSAPRGTNQTCHPGCHCPSGMLLLNNVCVPTQDCPCAHEGHLYPPGSTVVRPCENCSCVSGLIANCSSWPCAEGEPTWSPWTPWSQCSASCGPARCHRHRFCARSPSAVPSTVAPLPLPATPTPLCSGPEAEEEPCLLQGCDRAGGWGPWGPWSHCSRSCGGGLRSRTRACDQPPPQGLGDYCEGPRAQGEVCQALPCPVTNCTAIEGAEYSPCGPPCPRSCDDLVHCVWRCQPGCYCPPGQVLSSNGAICVQPGHCSCLDLLTGQRHHPGARLARPDGCNHCTCLEGRLNCTDLPCPVPGGWCPWSEWTMCSQPCRGQTRSRSRACACPTPQHGGAPCTGEAGEAGAQHQREACPSYATCPVDGAWGPWGPWSPCDMCLGQSHRSRACSRPPTPEGGRPCPGNHTQSRPCQENSTQCTDCGGGQSLHPCGQPCPRSCQDLSPGSVCQPGSVGCQPTCGCPLGQLSQDGLCVPPAHCRCQYQPGAMGIPENQSRSAGSRFSSWESLEPGEVVTGPCDNCTCVAGILQCQEVPDCPDPGVWSSWGPWEDCSVSCGGGEQLRSRRCARPPCPGPARQSRTCSTQVCREAGCPAGRLYRECQPGEGCPFSCAHVTQQVGCFSEGCEEGCHCPEGTFQHRLACVQECPCVLTAWLLQELGATIGDPGQPLGPGDELDSGQTLRTSCGNCSCAHGKLSCSLDDCFEADGGFGPWSPWGPCSRSCGGLGTRTRSRQCVLTMPTLSGQGCRGPRQDLEYCPSPDCPGAEGSTVEPVTGLPGGWGPWSSWSPCSRSCTDPARPAWRSRTRLCLANCTMGDPLQERPCNLPSCTELPVCPGPGCGAGNCSWTSWAPWEPCSRSCGVGQQRRLRAYRPPGPGGHWCPNILTAYQERRFCNLRACPVPGGWSRWSPWSWCDRSCGGGQSLRSRSCSSPPSKNGGAPCAGERHQARLCNPMPCEAGCPAGMEVVTCANRCPRRCSDLQEGIVCQDDQVCQKGCRCPKGSLEQDGGCVPIGHCDCTDAQGHSWAPGSQHQDACNNCSCQAGQLSCTAQPCPPPTHCAWSHWSAWSPCSHSCGPRGQQSRFRSSTSGSWAPECREEQSQSQPCPQPSCPPLCLQGTRSRTLGDSWLQGECQRCSCTPEGVICEDTECAVPEAWTLWSSWSDCPVSCGGGNQVRTRACRAAAPHHRSPPCLGPDTQTRQQPCPGLLEACSWGPWGPCSRSCGPGLASRSGSCPCLMAKADPTCNSTFLHLDTQGCYSGPCPEECVWSSWSSWTRCSCRVLVQQRYRHQGPASRGARAGAPCTRLDGHFRPCLISNCSEDSCTPPFEFHACGSPCAGLCATHLSHQLCQDLPPCQPGCYCPKGLLEQAGGCIPPEECNCWHTSAAGAGMTLAPGDRLQLGCKECECRRGELHCTSQGCQGLLPLSEWSEWSPCGPCLPPSALAPASRTALEEHWLRDPTGLSPTLAPLLASEQHRHRLCLDPATGRPWTGAPHLCTAPLSQQRLCPDPGACPDSCQWSLWGPWSPCQVPCSGGFRLRWREAEALCGGGCREPWAQESCNGGPCPESCEAQDTVFTLDCANQCPHSCADLWDRVQCLQGPCRPGCRCPPGQLVQDGRCVPISSCRCGLPSANASWELAPAQAVQLDCQNCTCVNESLVCPHQECPVLGPWSAWSSCSAPCGGGTMERHRTCEGGPGVAPCQAQDTEQRQECNLQPCPECPPGQVLSACATSCPCLCWHLQPGAICVQEPCQPGCGCPGGQLLHNGTCVPPTACPCTQHSLPWGLTLTLEEQAQELPPGTVLTRNCTRCVCHGGAFSCSLVDCQVPPGETWQQVAPGELGLCEQTCLEMNATKTQSNCSSARASGCVCQPGHFRSQAGPCVPEDHCECWHLGRPHLPGSEWQEACESCLCLSGRPVCTQHCSPLTCAQGEEMVLEPGSCCPSCRREAPEEQSPSCQLLTELRNFTKGTCYLDQVEVSYCSGYCPSSTHVMPEEPYLQSQCDCCSYRLDPESPVRILNLRCLGGHTEPVVLPVIHSCQCSSCQGGDFSKR

SEQ ID NO: 12847 - protein, 115 aa, Homo Sapiens [sequence omitted]

SEQ ID NO: 12848 - protein, 62 aa, Homo Sapiens
MRLLSFVVLALFAVTQAEEGARLLASKSLLNRYAVEGRDLTLQYNIYNVGSRHVHEEKLRQG

SEQ ID NO: 12849 - protein, 86 aa, Homo Sapiens
MRLLSFVVLALFAVTQAEEGARLLASKSLLNRYAVEGRDLTLQYNIYNVGSRLALPVHLDREESWLSGSLTGDSPLIFWTGQPLGS

SEQ ID NO: 12850 - protein, 147 aa, Homo Sapiens
MRLLSFVVLALFAVTQAEEGARLLASKSLLNRYAVEGRDLTLQYNIYNVGSSAALDVELSDDSFPPEDFGIVSGMLNVKWDRIAPASNVSHTVVLRPLKAGYFNFTSATITYLAQEDGPVVIGSTSAPGQGGILAQREFDRRFSPHF

SEQ ID NO: 12851 - protein, 183 aa, Homo Sapiens
MRLLSFVVLALFAVTQAEEGARLLASKSLLNRYAVEGRDLTLQYNIYNVGSSAALDVELSDDSFPPEDFGIVSGMLNVKWDRIAPASNVSHTVVLRPLKAGYFNFTSATITYLAQEDGPVVIGSTSAPGQGGILAQREFDRRFSPHFLDWAAFGVMTLPSIGIPLLLWYSSKRKYDTPKTKKN

SEQ ID NO: 12852 - protein, 183 aa, Homo Sapiens; identical to SEQ ID NO: 12851

SEQ ID NO: 12853 - protein, 133 aa, Homo Sapiens
MRLLSFVVLALFAVTQAEEGARLLASKSLLNRYAVEGRDLTLQYNIYNVGSSAALDVELSDDSFPPEDFGIVSGMLNVKWDRIAPASNVSHTVVLRPLKAGYFNFTSATITYLAQEDGPVVNQPQDSLVLPGS

SEQ ID NO: 12854 - protein, 133 aa, Homo Sapiens; identical to SEQ ID NO: 12853

SEQ ID NO: 12855 - protein, 93 aa, Homo Sapiens
MRLLSFVVLALFAVTQAEEGARLLASKSLLNRYAVEGRDLTLQYNIYNVGSSAALDVELSDDSFPPEDFGIVSGMLNVKWDRIAPWTGQPLGS

SEQ ID NO: 12856 - protein, 90 aa, Homo Sapiens
MRLLSFVVLALFAVTQAEEGARLLASKSLLNRYAVEGRDLTLQYNIYNVGSSAALDVELSDDSFPPEDFGIVSGMLNVKWDRIAPYPLGT

SEQ ID NO: 12857 - protein, 116 aa, Homo Sapiens
MLSCRLQCALAALSIVLALGCVTGAPSDPRLRQFLQKSLAAAAGKQELAKYFLAELLSEPNQTENDALEPEDLSQAAEQDEMRLELQRSANSNPAMAPRERKAGCKNFFWKTFTSC

SEQ ID NO: 12858 - protein, 46 aa, Homo Sapiens
MLEKRSVGCRRCAVVGNSGNLRESSYGPEIDSHDFVLRMNKAPTAG

SEQ ID NO: 12859 - protein, 97 aa, Homo Sapiens
MLEKRSVGCRRCAVVGNSGNLRESSYGPEIDSHDFVLRMNKAPTAGFEADVGTKTTHHLVYPESFRELGDNVSMILVPFKTIDLEWVVSAITTGTIS

SEQ ID NO: 12860 - protein, 47 aa, Homo Sapiens
MVTLRKRTLKVLTFLVLFIFLTSFFLNYSHTMVATTWFPKQMVLELS

SEQ ID NO: 12861 - protein, 49 aa, Homo Sapiens
MVTLRKRTLKVLTFLVLFIFLTSFFLNYSHTMVATTWFPKQMVLELSEN

SEQ ID NO: 12862 - protein, 72 aa, Homo Sapiens
MVTLRKRTLKVLTFLVLFIFLTSFFLNYSHTMVATTWFPKQMVLELSENLKRLIKHRPCTCTHCIGQRKLSA

SEQ ID NO: 12863 - protein, 340 aa, Homo Sapiens
MVTLRKRTLKVLTFLVLFIFLTSFFLNYSHTMVATTWFPKQMVLELSENLKRLIKHRPCTCTHCIGQRKLSAWFDERFNQTMQPLLTAQNALLEDDTYRWWLRLQREKKPNNLNDTIKELFRVVPGNVDPMLEKRSVGCRRCAVVGNSGNLRESSYGPEIDSHDFVLRMNKAPTAGFEADVGTKTTHHLVYPESFRELGDNVSMILVPFKTIDLEWVVSAITTGTISHTYIPVPAKIRVKQDKILIYHPAFIKYVFDNWLQGHGRYPSTGILSVIFSMHVCDEVDLYGFGADSKGNWHHYWENNPSAGAFRKTGVHDADFESNVTATLASINKIRIFKGR

SEQ ID NO: 12864 - protein, 340 aa, Homo Sapiens; identical to SEQ ID NO: 12863

SEQ ID NO: 12865 - protein, 340 aa, Homo Sapiens; identical to SEQ ID NO: 12863

SEQ ID NO: 12866 - protein, 332 aa, Homo Sapiens
MCPAGWKLLAMLALVLVVMVWYSISREDRYIELFYFPIPEKKEPCLQGEAESKASKLFGNYSRDQPIFLRLEDYFWVKTPSAYELPYGTKGSEDLLLRVLAITSSSIPKNIQSLRCRRCVVVGNGHRLRNSSLGDAINKYDVVIRLNNAPVAGYEGDVGSKTTMRLFYPESAHFDPKVENNPDTLLVLVAFKAMDFHWIETILSDKKRVRKGFWKQPPLIWDVNPKQIRILNPFFMEIAADKLLSLPMQQPRKIKQKPTTGLLAITLALHLCDLVHIAGFGYPDAYNKKQTIHYYEQITLKSMAGSGHNVSQEALAIKRMLEMGAIKNLTSF

SEQ ID NO: 12867 - protein, 328 aa, Homo Sapiens
MCPAGWKLLAMLALVLVVMVWYSISREDSFYFPIPEKKEPCLQGEAESKASKLFGNYSRDQPIFLRLEDYFWVKTPSAYELPYGTKGSEDLLLRVLAITSSSIPKNIQSLRCRRCVVVGNGHRLRNSSLGDAINKYDVVIRLNNAPVAGYEGDVGSKTTMRLFYPESAHFDPKVENNPDTLLVLVAFKAMDFHWIETILSDKKRVRKGFWKQPPLIWDVNPKQIRILNPFFMEIAADKLLSLPMQQPRKIKQKPTTGLLAITLALHLCDLVHIAGFGYPDAYNKKQTIHYYEQITLKSMAGSGHNVSQEALAIKRMLEMGAIKNLTSF

SEQ ID NO: 12868 - protein, 322 aa, Homo Sapiens
MLALVLVVMVWYSISREDRYIELFYFPIPEKKEPCLQGEAESKASKLFGNYSRDQPIFLRLEDYFWVKTPSAYELPYGTKGSEDLLLRVLAITSSSIPKNIQSLRCRRCVVVGNGHRLRNSSLGDAINKYDVVIRLNNAPVAGYEGDVGSKTTMRLFYPESAHFDPKVENNPDTLLVLVAFKAMDFHWIETILSDKKRVRKGFWKQPPLIWDVNPKQIRILNPFFMEIAADKLLSLPMQQPRKIKQKPTTGLLAITLALHLCDLVHIAGFGYPDAYNKKQTIHYYEQITLKSMAGSGHNVSQEALAIKRMLEMGAIKNLTSF

SEQ ID NO: 12869 - protein, 153 aa, Homo Sapiens
MRLFYPESAHFDPKVENNPDTLLVLVAFKAMDFHWIETILSDKKRVRKGFWKQPPLIWDVNPKQIRILNPFFMEIAADKLLSLPMQQPRKIKQKPTTGLLAITLALHLCDLVHIAGFGYPDAYNKKQTIHYYEQITLKSMAGSGHNVSQEALA

SEQ ID NO: 12870 - protein, 47 aa, Homo Sapiens
MSVLSGPGWTTGCPWPQNHPNPCHISGREVARGSRDDSSPQESCCLL

SEQ ID NO: 12871 - protein, 339 aa, Homo Sapiens
MVSKSRWKLLAMLALVLVVMVWYSISREDRYIELFYFPIPEKKEPCLQGEAESKASKLFGKLSPLCSYSRDQPIFLRLEDYFWVKTPSAYELPYGTKGSEDLLLRVLAITSSSIPKNIQSLRCRRCVVVGNGHRLRNSSLGDAINKYDVVIRLNNAPVAGYEGDVGSKTTMRLFYPESAHFDPKVENNPDTLLVLVAFKAMDFHWIETILSDKKRVRKGFWKQPPLIWDVNPKQIRILNPFFMEIAADKLLSLPMQQPRKIKQKPTTGLLAITLALHLCDLVHIAGFGYPDAYNKKQTIHYYEQITLKSMAGSGHNVSQEALAIKRMLEMGAIKNLTSF

SEQ ID NO: 12872 - protein, 93 aa, Homo Sapiens
MVSKSRWKLLAMLALVLVVMVWYSISREDRYIELFYFPIPEKKEPCLQGEAESKASKLFGNYSRDQPIFLRLEDYFWVKTPSAYELPYGTKGS

SEQ ID NO: 12873 - protein, 126 aa, Homo Sapiens
MVSKSRWKLLAMLALVLVVMVWYSISREDRYIELFYFPIPEKKEPCLQGEAESKASKLFGNYSRDQPIFLRLEDYFWVKTPSAYELPYGTKGSASGAAAVWSWGTGTGCGTAHWEMPSTSTMWSSD

SEQ ID NO: 12874 - protein, 111 aa, Homo Sapiens
MVSKSRWKLLAMLALVLVVMVWYSISREDRYIELFYFPIPEKKEPCLQGEAESKASKLFGNYSRDQPIFLRLEDYFWVKTPSAYELPYGTKGSEDLLLRVLAITSSSIPKN

SEQ ID NO: 12875 - protein, 209 aa, Homo Sapiens
MVSKSRWKLLAMLALVLVVMVWYSISREDRYIELFYFPIPEKKEPCLQGEAESKASKLFGNYSRDQPIFLRLEDYFWVKTPSAYELPYGTKGSEDLLLRVLAITSSSIPKNIQSLRCRRCVVVGNGHRLRNSSLGDAINKYDVVIRLNNAPVAGYEGDVGSKTTMRLFYPESAHFDPKVENNPDTLLVLVAFKAMDFHWIETILSDKKR

SEQ ID NO: 12876 - protein, 333 aa, Homo Sapiens
MVSKSRWKLLAMLALVLVVMVWYSISREDRYIELFYFPIPEKKEPCLQGEAESKASKLFGNYSRDQPIFLRLEDYFWVKTPSAYELPYGTKGSEDLLLRVLAITSSSIPKNIQSLRCRRCVVVGNGHRLRNSSLGDAINKYDVVIRLNNAPVAGYEGDVGSKTTMRLFYPESAHFDPKVENNPDTLLVLVAFKAMDFHWIETILSDKKRVRKGFWKQPPLIWDVNPKQIRILNPFFMEIAADKLLSLPMQQPRKIKQKPTTGLLAITLALHLCDLVHIAGFGYPDAYNKKQTIHYYEQITLKSMAGSGHNVSQEALAIKRMLEMGAIKNLTSF

SEQ ID NO: 12877 - protein, 333 aa, Homo Sapiens; identical to SEQ ID NO: 12876

SEQ ID NO: 12878 - protein, 333 aa, Homo Sapiens; identical to SEQ ID NO: 12876

SEQ ID NO: 12879 - protein, 333 aa, Homo Sapiens; identical to SEQ ID NO: 12876

SEQ ID NO: 12880 - protein, 329 aa, Homo Sapiens
MVSKSRWKLLAMLALVLVVMVWYSISREDSFYFPIPEKKEPCLQGEAESKASKLFGNYSRDQPIFLRLEDYFWVKTPSAYELPYGTKGSEDLLLRVLAITSSSIPKNIQSLRCRRCVVVGNGHRLRNSSLGDAINKYDVVIRLNNAPVAGYEGDVGSKTTMRLFYPESAHFDPKVENNPDTLLVLVAFKAMDFHWIETILSDKKRVRKGFWKQPPLIWDVNPKQIRILNPFFMEIAADKLLSLPMQQPRKIKQKPTTGLLAITLALHLCDLVHIAGFGYPDAYNKKQTIHYYEQITLKSMAGSGHNVSQEALAIKRMLEMGAIKNLTSF

SEQ ID NO: 12881 - protein, 329 aa, Homo Sapiens; identical to SEQ ID NO: 12880

SEQ ID NO: 12882 - protein, 178 aa, Homo Sapiens
LIPRLQKIWKNYLSMNKYKVSYKGPGPGIKFSAEALRCHLRDHVNVSMVEVTDFPFNTSEWEGYLPKESIRTKAGPWGRCAVVSSAGSLKSSQLGREIDDHDAVLRFNGAPTANFQQDVGTKTTIRLMNSQISVHHCARAARKVAHFPGYTTHPQESLSCCFLVGYHREALPQRQFVQ

SEQ ID NO: 12883 - protein, 25 aa, Homo Sapiens
MIHTNLKKKFSCCVLVFLLFAVICV

SEQ ID NO: 12884 - protein, 42 aa, Homo Sapiens
MIHTNLKKKFSCCVLVFLLFAVICVWKEKKKGSYYDSFKLQT

SEQ ID NO: 12885 - protein, 45 aa, Homo Sapiens
MIHTNLKKKFSCCVLVFLLFAVICVWKEKKKGSYYDSFKLQTKEF

SEQ ID NO: 12886 - protein, 75 aa, Homo Sapiens
MIHTNLKKKFSCCVLVFLLFAVICVWKEKKKGSYYDSFKLQTKEFQVLKSLGKLAMGSDSQSVSSSSTQDPHRGR

SEQ ID NO: 12887 - protein, 91 aa, Homo Sapiens
MIHTNLKKKFSCCVLVFLLFAVICVWKEKKKGSYYDSFKLQTKEFQVLKSLGKLAMGSDSQSVSSSSTQDPHRGRQTLGSLRGLAKAKPEA

SEQ ID NO: 12888 - protein, 97 aa, Homo Sapiens
MIHTNLKKKFSCCVLVFLLFAVICVWKEKKKGSYYDSFKLQTKEFQVLKSLGKLAMGSDSQSVSSSSTQDPHRGRQTLGSLRGLAKAKPEASFQVWN

SEQ ID NO: 12889 - protein, 98 aa, Homo Sapiens
MIHTNLKKKFSCCVLVFLLFAVICVWKEKKKGSYYDSFKLQTKEFQVLKSLGKLAMGSDSQSVSSSSTQDPHRGRQTLGSLRGLAKAKPEASFQVWNK

SEQ ID NO: 12890 - protein, 113 aa, Homo Sapiens
MIHTNLKKKFSCCVLVFLLFAVICVWKEKKKGSYYDSFKLQTKEFQVLKSLGKLAMGSDSQSVSSSSTQDPHRGRQTLGSLRGLAKAKPEASFQVWNKDSSSKNLIPRLQKIW

SEQ ID NO: 12891 - protein, 127 aa, Homo Sapiens
MIHTNLKKKFSCCVLVFLLFAVICVWKEKKKGSYYDSFKLQTKEFQVLKSLGKLAMGSDSQSVSSSSTQDPHRGRQTLGSLRGLAKAKPEASFQVWNKDSSSKNLIPRLQKIWKNYLSMNKYKVSYK

SEQ ID NO: 12892 - protein, 406 aa, Homo Sapiens
MIHTNLKKKFSCCVLVFLLFAVICVWKEKKKGSYYDSFKLQTKEFQVLKSLGKLAMGSDSQSVSSSSTQDPHRGRQTLGSLRGLAKAKPEASFQVWNKDSSSKNLIPRLQKIWKNYLSMNKYKVSYKGPGPGIKFSAEALRCHLRDHVNVSMVEVTDFPFNTSEWEGYLPKESIRTKAGPWGRCAVVSSAGSLKSSQLGREIDDHDAVLRFNGAPTANFQQDVGTKTTIRLMNSQLVTTEKRFLKDSLYNEGILIVWDPSVYHSDIPKWYQNPDYNFFNNYKTYRKLHPNQPFYILKPQMPWELWDILQEISPEEIQPNPPSSGMLGIIIMMTLCDQVDIYEFLPSKRKTDVCYYYQKFFDSACTMGAYHPLLYEKNLVKHLNQGTDEDIYLLGKATLPGFRTIHC

SEQ ID NO: 12893 - protein, 406 aa, Homo Sapiens; identical to SEQ ID NO: 12892

SEQ ID NO: 12894 - protein, 21 aa, Homo Sapiens
MNSQLVTTEKRFLKDSLYNEG

SEQ ID NO: 12895 - protein, 52 aa, Homo Sapiens
MNSQLVTTEKRFLKDSLYNEGILIVWDPSVYHSDIPKWYQNPDYNFFNNYKT

SEQ ID NO: 12896 - protein, 115 aa, Homo Sapiens
MNSQLVTTEKRFLKDSLYNEGILIVWDPSVYHSDIPKWYQNPDYNFFNNYKTYRKLHPNQPFYILKPQMPWELWDILQEISPEEIQPNPPSSGMLGIIIMMTLCDQVDIYEFLPS

SEQ ID NO: 12897 - protein, 175 aa, Homo Sapiens
MNSQLVTTEKRFLKDSLYNEGILIVWDPSVYHSDIPKWYQNPDYNFFNNYKTYRKLHPNQPFYILKPQMPWELWDILQEISPEEIQPNPPSSGMLGIIIMMTLCDQVDIYEFLPSKRKTDVCYYYQKFFDSACTMGAYHPLLYEKNLVKHLNQGTDEDIYLLGKATLPGFRTIHC

SEQ ID NO: 12898 - protein, 212 aa, Homo Sapiens
LSLLNGSESAKLFAPPRDTPPKCIRCAVVGNGGILNGSRQGPNIDAHDYVFRLNGAVIKGFERDVGTKTSFYGFTVNTMKNSLVSYWNLGFTSVPQGQDLQYIFIPSDIRDYVMLRSAILGVPVPEGLDKGDRFLKSKLINTHFGDLYMPSTGALMLLTALHTCDQVSAYGFITSNYWKFSDHYFERKMKPLIFYANHDLSLEAALWRDLHK

SEQ ID NO: 12899 - protein, 84 aa, Homo Sapiens
MGLPRGSFFWLLLLLTAACSGLLFALYFSAVQRYPGPAAGARARPADTCFTWPFSGTPTSVACSISPFQCCCGGTSSPQRSGTA

SEQ ID NO: 12900 - protein, 374 aa, Homo Sapiens
MGLPRGSFFWLLLLLTAACSGLLFALYFSAVQRYPGPAAGARDTTSFEAFFQSKASNSWTGKGQACRHLLHLAIQRHPHFRGLFNLSIPVLLWGDLFTPALWDRLSQHKAPYGWRGLSHQVIASTLSLLNGSESAKLFAPPRDTPPKCIRCAVVGNGGILNGSRQGPNIDAHDYVFRLNGAVIKGFERDVGTKTSFYGFTVNTMKNSLVSYWNLGFTSVPQGQDLQYIFIPSDIRDYVMLRSAILGVPVPEGLDKGDRPHAYFGPEASASKFKLLHPDFISYLTERFLKSKLINTHFGDLYMPSTGALMLLTALHTCDQVSAYGFITSNYWKFSDHYFERKMKPLIFYANHDLSLEAALWRDLHKAGILQLYQR

SEQ ID NO: 12901 - protein, 74 aa, Homo Sapiens
MGLPRGSFFWLLLLLTAACSGLLFALYFSAVQRYPGPAAGASCQPRVPSTCGCWGEGRGLREAWPPFERGHHII

SEQ ID NO: 12902 - protein, 38 aa, Homo Sapiens
  misc_feature (1)..(1): Xaa can be any naturally occurring amino acid
XDYVMLRSAILGVPVPEGLDKGDSPAPTAQGTAATPAP

SEQ ID NO: 12903 - protein, 336 aa, Homo Sapiens
MKTLMRHGLAVCLALTTMCTSLLLVYSSLGGQKERPPQQQQQQQQQQQQASATGSSQPAAESSTQQRPGVPAGPRPLDGYLGVADHKPLKMHCRDCALVTSSGHLLHSRQGSQIDQTECVIRMNDAPTRGYGRDVGNRTSLRVIAHSSIQRILRNRHDLLNVSQGTVFIFWGPSSYMRRDGKGQVYNNLHLLSQVLPRLKAFMITRHKMLQFDELFKQETGKDRKISNTWLSTGWFTMTIALELCDRINVYGMVPPDFCRDPNHPSVPYHYYEPFGPDECTMYLSHERGRKGSHHRFITEKRVFKNWARTFNIHFFQPDWKPESLAINHPENKPVF

SEQ ID NO: 12904 - protein, 236 aa, Homo Sapiens
MKTLMRHGLAVCLALTTMCTSLLLVYSSLGGQKERPPQQQQQQQQQQQQASATGSSQPAAESSTQQRPGVPAGPRPLDGYLGVADHKPLKMHCRDCALVTSSGHLLHSRQGSQIDQTECVIRMNDAPTRGYGRDVGNRTSLRVIAHSSIQRILRNRHDLLNVSQGTVFIFWGPSSYMRRDGKGQVYNNLHLLSQVLPRLKAFMITRHKMLQFDELFKQETGKDRYPTLGSALAGLQ

SEQ ID NO: 12905 - protein, 333 aa, Homo Sapiens
MACSRPPSQCEPTSLPPGPPAGRRHLPLSRRRREMSSNKEQRSAVFVILFALITILILYSSNSANEVFHYGSLRGRSRRPVNLKKWSITDGYVPILGNKTLPSRCHQCVIVSSSSHLLGTKLGPEIERAECTIRMNDAPTTGYSADVGNKTTYRVVAHSSVFRVLRRPQEFVNRTPETVFIFWGPPSKMQKPQGSLVRVIQRAGLVFPNMEAYAVSPGRMRQFDDLFRGETGKDREKSHSWLSTGWFTMVIAVELCDHVHVYGMVPPNYCSQRPRLQRMPYHYYEPKGPDECVTYIQNEHSRKGNHHRFITEKRVFSSWAQLYGITFSHPSWT

SEQ ID NO: 12906 - protein, 333 aa, Homo Sapiens; identical to SEQ ID NO: 12905

SEQ ID NO: 12907 - protein, 374 aa, Homo Sapiens
MACSRPPSQCEPTSLPPGPPAGRRHLPLSRRRREMSSNKEQRSAVFVILFALITILILYSSNSANEVFHYGSLRGRSRRPVNLKKWSITDGYVPILGNKTLPSRCHQCVIVSSSSHLLGTKLGPEIERAECTIRMNDAPTTGYSADVGNKTTYRVVAHSSVFRVLRRPQEFVNRTPETVFIFWGPPSKMQKPQGSLVRVIQRAGLVFPNMEAYAVSPGRMRQFDDLFRGETGKDREKSHSWLSTGWFTMVIAVELCDHVHVYGMVPPNYCSGPASSACPTTTTSPRGRTNVSPTSRMSTVARATTTASSPRKGSSHRGPSCMASPSPTPPGPRPPSLWDLRRVRGEAASAQPLGQGPSSGQSRLAGVSPSQSGP

SEQ ID NO: 12908 - protein, 86 aa, Homo Sapiens
MSSNKEQRSAVFVILFALITILILYSSNSANEVFHYGSLRGRSRRPVNLKKWSITDGYVPILGNKGEVSFVVEHRLVYHGDRGGVV

SEQ ID NO: 12909 - protein, 200 aa, Homo Sapiens
MSSNKEQRSAVFVILFALITILILYSSNSANEVFHYGSLRGRSRRPVNLKKWSITDGYVPILGNKTLPSRCHQCVIVSSSSHLLGTKLGPEIERAECTIRMNDAPTTGYSADVGNKTTYRVVAHSSVFRVLRRPQEFVNRTPETVFIFWGPPSKMQKPQGSLVRVIQRAGLVFPNMEAYAVSPGRMRQFDDLFRGETGKD

SEQ ID NO: 12910 - protein, 299 aa, Homo Sapiens
MSSNKEQRSAVFVILFALITILILYSSNSANEVFHYGSLRGRSRRPVNLKKWSITDGYVPILGNKTLPSRCHQCVIVSSSSHLLGTKLGPEIERAECTIRMNDAPTTGYSADVGNKTTYRVVAHSSVFRVLRRPQEFVNRTPETVFIFWGPPSKMQKPQGSLVRVIQRAGLVFPNMEAYAVSPGRMRQFDDLFRGETGKDREKSHSWLSTGWFTMVIAVELCDHVHVYGMVPPNYCSQRPRLQRMPYHYYEPKGPDECVTYIQNEHSRKGNHHRFITEKRVFSSWAQLYGITFSHPSWT

SEQ ID NO: 12911 - protein, 299 aa, Homo Sapiens; identical to SEQ ID NO: 12910

SEQ ID NO: 12912 - protein, 299 aa, Homo Sapiens; identical to SEQ ID NO: 12910

SEQ ID NO: 12913 - protein, 354 aa, Homo Sapiens
MQLQFRSWMLAALTLLVVFLIFADISEIEEEIGAEVVINGSSSPAVVDRSNESIKHNIQPASSKWRHNQTLSLRIRKQILKFLDAEKDISVLKGTLKPGDIIHYIFDRDSTMNVSQNLYELLPRTSPLKNKHFGTCAIVGNSGVLLNSGCGQEIDAHSFVIRCNLAPVQEYARDVGLKTDLVTMNPSVIQRAFEDLVNATWREKLLQRLHSLNGSILWIPAFMARGGKERVEWVNELILKHHVNVRTAYPSLRLLHAVRGYWLTNKVHIKRPTTGLLMYTLATRFCKQIYLYGFWPFPLDQNQNPVKYHYYDSLKYGYTSQASPHTMPLEFKALKSLHEQGALKLTVGQCDGAT

SEQ ID NO: 12914 - protein, 375 aa, Homo Sapiens
MQLQFRSWMLAALTLLVVFLIFADISEIEEEIGNSGGRGTIRSAVNSLHSKSNRAEVVINGSSSPAVVDRSNESIKHNIQPASSKWRHNQTLSLRIRKQILKFLDAEKDISVLKGTLKPGDIIHYIFDRDSTMNVSQNLYELLPRTSPLKNKHFGTCAIVGNSGVLLNSGCGQEIDAHSFVIRCNLAPVQEYARDVGLKTDLVTMNPSVIQRAFEDLVNATWREKLLQRLHSLNGSILWIPAFMARGGKERVEWVNELILKHHVNVRTAYPSLRLLHAVRGYWLTNKVHIKRPTTGLLMYTLATRFCKQIYLYGFWPFPLDQNQNPVKYHYYDSLKYGYTSQASPHTMPLEFKALKSLHEQGALKLTVGQCDGAT

SEQ ID NO: 12915 - protein, 332 aa, Homo Sapiens
MQLQFRSWMLAALTLLVVFLIFADISEIEEEIGNSGGRGTIRSAVNSLHSKSNRKQILKFLDAEKDISVLKGTLKPGDIIHYIFDRDSTMNVSQNLYELLPRTSPLKNKHFGTCAIVGNSGVLLNSGCGQEIDAHSFVIRCNLAPVQEYARDVGLKTDLVTMNPSVIQRAFEDLVNATWREKLLQRLHSLNGSILWIPAFMARGGKERVEWVNELILKHHVNVRTAYPSLRLLHAVRGYWLTNKVHIKRPTTGLLMYTLATRFCKQIYLYGFWPFPLDQNQNPVKYHYYDSLKYGYTSQASPHTMPLEFKALKSLHEQGALKLTVGQCDGAT

SEQ ID NO: 12916 - protein, 46 aa, Homo Sapiens
MRSIRKRWTICTISLLLIFYKTKEIARTEEHQETQLIGASGGGVDS

SEQ ID NO: 12917 - protein, 168 aa, Homo Sapiens
MRSIRKRWTICTISLLLIFYKTKEIARTEEHQETQLIGDGELSLSRSLVNSSDKIIRKAGSSIFQHNVEGWKINSSLVLEIRKNILRFLDAERDVSVVKSSFKPGDVIHYVLDRRRTLNISHDLHSLLPEVSPMKNRRFKTCAVVGNSGILLDSECGKEIDSHNFVIR

SEQ ID NO: 12918 - protein, 359 aa, Homo Sapiens
MRSIRKRWTICTISLLLIFYKTKEIARTEEHQETQLIGDGELSLSRSLVNSSDKIIRKAGSSIFQHNVEGWKINSSLVLEIRKNILRFLDAERDVSVVKSSFKPGDVIHYVLDRRRTLNISHDLHSLLPEVSPMKNRRFKTCAVVGNSGILLDSECGKEIDSHNFVIRCNLAPVVEFAADVGTKSDFITMNPSVVQRAFGGFRNESDREKFVHRLSMLNDSVLWIPAFMVKGGEKHVEWVNALILKNKLKVRTAYPSLRLIHAVRGYWLTNKVPIKRPSTGLLMYTLATRFCDEIHLYGFWPFPKDLNGKAVKYHYYDDLKYRYFSNASPHRMPLEFKTLNVLHNRGALKLTTGKCVKQ

SEQ ID NO: 12919 - protein, 398 aa, Homo Sapiens
MRPGGALLALLASLLLLLLLRLLWCPADAPGRARILVEESREATHGTPAALRTLRSPATAVPRATNSTYLNEKSLQLTEKCKNLQYGIESFSNKTKGYSENDYLQIITDIQSCPWKRQAEEYANFRAKLASCCDAVQNFVVSQNNTPVGTNMSYEVESKKEIPIKKNIFHMFPVSQPFVDYPYNQCAVVGNGGILNKSLCGTEIDKSDFVFRCNLPPTTGDVSKDVGSKTNLVTINPSIITLKYGNLKEKKALFLEDIATYGDAFFLLPAFSFRANTGTSFKVYYTLEESKARQKVLFFHPKYLKDLALFWRTKGVTAYRLSTGLMITSVAVELCKNVKLYGFWPFSKTVEDIPVSHHYYDNKLPKHGFHQMPKEYSQILQLHMKGILKLQFSKCEVA

SEQ ID NO: 12920 - protein, 128 aa, Homo Sapiens
  misc_feature (1)..(1): Xaa can be any naturally occurring amino acid
XYPYNQCAVVGNGGILNKSLCGTEIDKSDFVFRCNLPPTTGDVSKDVGSKTNLVTINPSIITLKYGNLKEKKALFLEDIATYGDAFFLLPAFSFRANTGTSFKVYYTLEESKARQKCKTKRKTINSIL

SEQ ID NO: 12921 - protein, 147 aa, Homo Sapiens
MKRLEEMSNMFQSSGVQHHPPEPKAQTEGNEDSEGKEQRWEMVMDKKHFKLWRRPITGTHLYQYRVFGTYTDVTPRQFFNVQLDTEYRKKWDALVIKLEVIERDVVSGSEVLHWVTHFPYPMYSRDYVYVRRYSVDQENNMMVLVSR

SEQ ID NO: 12922 - protein, 370 aa, Homo Sapiens
MLPRRLLAAWLAGTRGGGLLALLANQCRFVTGLRVRRAQQIAQLYGRLYSESSRRVLLGRLWRRLHGRPGHASALMAALAGVFVWDEERIQEEELQRSINEMKRLEEMSNMFQSSGVQHHPPEPKAQTEGNEDSEGKEQRWEMVMDKKHFKLWRRPITGTHLYQYRVFGTYTDVTPRQFFNVQLDTEYRKKWDALVIKLEVIERDVVSGSEVLHWVTHFPYPMYSRDYVYVRRYSVDQENNMMVLVSRAVEHPSVPESPEFVRVRSYESQMVIRPHKSFDENGFDYLLTYSDNPQTVFPRYCVSWMVSSGMPDFLEKLHMATLKAKNMEIKVKDYISAKPLEMSSEAKATSQSSERKNEGSCGPARIEYA

SEQ ID NO: 12923 - protein, 62 aa, Homo Sapiens
MKFLVFAFILALMVSMIGADSSEEKFLRRIGRFGYGYGPYQPVPEQPLYPQPYQPQYQQYTF

SEQ ID NO: 12924 - protein, 62 aa, Homo Sapiens; identical to SEQ ID NO: 12923

SEQ ID NO: 12925 - protein, 52 aa, Homo Sapiens
MKFLVFAFILALMVSMIGADSSEEYGYGPYQPVPEQPLYPQPYQPQYQQYTF

SEQ ID NO: 12926 - protein, 247 aa, Homo Sapiens
MLQNSAVLLVLVISASATHEAEQNDSVSPRKSRVAAQNSAEVVRCLNSALQVGCGAFACLENSTCDTDGMYDICKSFLYSAAKFDTQGKAFVKESLKCIANGVTSKVFLAIRRCSTFQRMIAEVQEECYSKLNVCSIAKRNPEAITEVVQLPNHFSNRYYNRLVRSLLECDEDTVSTIRDSLMEKIGPNMASLFHILQTDHCAQTHPRADFNRRRTNEPQKLKVLLRNLRGEEDSPSHIKRTSHESA

SEQ ID NO: 12927 - protein, 178 aa, Homo Sapiens
MYDICKSFLYSAAKFDTQGKAFVKESLKCIANGVTSKVFLAIRRCSTFQRMIAEVQEECYSKLNVCSIAKRNPEAITEVVQLPNHFSNRYYNRLVRSLLECDEDTVSTIRDSLMEKIGPNMASLFHILQTDHCAQTHPRADFNRRRTNEPQKLKVLLRNLRGEEDSPSHIKRTSHESA

SEQ ID NO: 12928 - protein, 302 aa, Homo Sapiens
MCAERLGQFMTLALVLATFDPARGTDATNPPEGPQDRSSQQKGRLSLQNTAEIQHCLVNAGDVGCGVFECFENNSCEIRGLHGICMTFLHNAGKFDAQGKSFIKDALKCKAHALRHRFGCISRKCPAIREMVSQLQRECYLKHDLCAAAQENTRVIVEMIHFKDLLLHEPYVDLVNLLLTCGEEVKEAITHSVQVQCEQNWGSLCSILSFCTSAIQKPPTAPPERQPQVDRTKLSRAHHGEAGHHLPEPSSRETGRGAKGERGSKSHPNAHARGRVGGLGAQGPSGSSEWEDEQSEYSDIRR

SEQ ID NO: 12929 - protein, 53 aa, Homo Sapiens
MTFLHNAGKFDAQGKSFIKDALKCKAHALRHRFGCISRKCPAIREMVSQLQRE

SEQ ID NO: 12930 - protein, 123 aa, Homo Sapiens
  misc_feature (1)..(1): Xaa can be any naturally occurring amino acid
XQNTAEIQHCLVNAGDVGCGVFECFENNSCEIRGLHGICMTFLHNAGKFDAQGKSFIKDALKCKAHALRHRFGCISRKCPAIREMVSQLQRECYLKHDLCAAAQENTRVIVEMIHFKDLLLHE

SEQ ID NO: 12931 - protein, 276 aa, Homo Sapiens
MGCGPSQPAEDRRRVRAPKKGWKEEFKADVSVPHTGENCSPRMEAALTKNTVDIAEGLEQVQMGSLPGTISENSPSPSERNRRVNSDLVTNGLINKPQSLESRERQKSSDILEELIVQGIIQSHSKVFRNGESYDVTLTTTEKPLRKPPSRLKKLKIKKQVKDFTMKDIEEKMEAAEERRKTKEEEIRKRLRSDRLLPSANHSDSAELDGAEVAFAKGLQRVRSAGFEPSDLQGGKPLKRKKSKCDATLIDRNESDESFGVVESDMSYNQADDIVY

SEQ ID NO: 12932 - protein, 200 aa, Homo Sapiens
MHVFFVFLSLLETLRRLPVADVSVPHTGENCSPRMEAALTKNTVDIAEGLEQVQMGSLPGTISENSPSPSERNRRVNSDLVTNGLINKPQSLESRERQKSSDILEELIVQGIIQSHSKVFRNGESYDVTLTTTEKPLRKPPSRLKKLKIKKQVKDFTMKDIEEKMEAAEERRKTKEEEIRKRLRSDRLLPSANHSDSAEL

SEQ ID NO: 12933 - protein, 45 aa, Homo Sapiens
MLQFLLGFTLGNVVGMYLAQNYDGIGSPSVSQAGVQWWDLGSLQL

SEQ ID NO: 12934 - protein, 47 aa, Homo Sapiens
MLQFLLGFTLGNVVGMYLAQNYDIPNLAKKLEEIKKDLDAKKKPPSA

SEQ ID NO: 12935 - protein, 310 aa, Homo Sapiens
MLARAARGTGALLLRGLNILIPVLDRIRYVQSLKEIVINVPEQSAVTLDNVTLQIDGVLYLRIMDPYKASYGVEDPEYAVTQLAQTTMRSELGKLSLDKVFRERESLNASIVDAINQAADCWGIRCLRYEIKDIHVPPRVKESMQMQVEAERRKRATVLESEGTRESAINVAEGKKQAQILASEAEKAEQINQAAGEASAVLAKAKAKAEAIRILAAALTQHNGDAAASLTVAEQYVSAFSKLAKDSNTILLPSNPGDVTSMVAQAMGVYGALTKAPVPGTPDSLSSGSSRDVQGTDASLDEELDRVKMS

SEQ ID NO: 12936 - protein, 356 aa, Homo Sapiens
MLARAARGTGALLLRGSLLASGRAPRRASSGLPRNTVVLFVPQQEAWVVERMGRFHRILEPGLNILIPVLDRIRYVQSLKEIVINVPEQSAVTLDNVTLQIDGVLYLRIMDPYKASYGVEDPEYAVTQLAQTTMRSELGKLSLDKVFRERESLNASIVDAINQAADCWGIRCLRYEIKDIHVPPRVKESMQMQVEAERRKRATVLESEGTRESAINVAEGKKQAQILASEAEKAEQINQAAGEASAVLAKAKAKAEAIRILAAALTQHNGDAAASLTVAEQYVSAFSKLAKDSNTILLPSNPGDVTSMVAQAMGVYGALTKAPVPGTPDSLSSGSSRDVQGTDASLDEELDRVKMS

SEQ ID NO: 12937 - protein, 311 aa, Homo Sapiens
MLARAARGTGALLLRGSLLASGRAPRRASSGLPRNTVVLFVPQQEAWVVERMGRFHRILEPGLNILIPVLDRIRYVQSLKEIVINVPEQSAVTLDNVTLQIDGVLYLRIMDPYKASYGVEDPEYAVTQLAQTTMRSELGKLSLDKVFRVEAERRKRATVLESEGTRESAINVAEGKKQAQILASEAEKAEQINQAAGEASAVLAKAKAKAEAIRILAAALTQHNGDAAASLTVAEQYVSAFSKLAKDSNTILLPSNPGDVTSMVAQAMGVYGALTKAPVPGTPDSLSSGSSRDVQGTDASLDEELDRVKMS

SEQ ID NO: 12938 - protein, 101 aa, Homo Sapiens
MQMQVEAERRKRATVLESEGTRESAINVAEGKKQAQILASEAEKAEQINQAAGEASAVLAKAKAKAEAIRILAAALTQHVRGPWVGMGTGIDSGRGSLIYA

SEQ ID NO: 12939 - protein, 169 aa, Homo Sapiens
MARPVQLAPGSLALVLCRLEAQKAAGAAEEPGGRAVFRAFRRANARCFWNARLARAASRLAFQGWLRRGVLLVRAPPACLQVLRDAWRRRALRPPRGFRIRAVGDVFPVQMNPITQSQFVPLGEVLCCAISDMNTAQIVVTQESLLERLMKHYPGHRVWDLIIQSFWMD

SEQ ID NO: 12940 - protein, 227 aa, Homo Sapiens
MARPVQLAPGSLALVLCRLEAQKAAGAAEEPGGRAVFRAFRRANARCFWNARLARAASRLAFQGWLRRGVLLVRAPPACLQVLRDAWRRRALRPPRGFRIRAVGDVFPVQMNPITQSQFVPLGEVLCCAISDMNTAQIVVTQESLLERLMKHYPGIAIPSEDILYTTLGTLIKERKIYHTGEGYFIVTPQTYFITNTTTQENKRMLPSDESRLMPASMTYLDTESGI

SEQ ID NO: 12941 - protein, 989 aa, Homo Sapiens
MARPVQLAPGSLALVLCRLEAQKAAGAAEEPGGRAVFRAFRRANARCFWNARLARAASRLAFQGWLRRGVLLVRAPPACLQVLRDAWRRRALRPPRGFRIRAVGDVFPVQMNPITQSQFVPLGEVLCCAISDMNTAQIVVTQESLLERLMKHYPGIAIPSEDILYTTLGTLIKERKIYHTGEGYFIVTPQTYFITNTTTQENKRMLPSDESRLMPASMTYLVSMESCAESAQENAAPISHCQSCQCFRDMHTQDVQEAPVAAEVTRKSHRGLGESVSWVQNGAVSVSAEHHICESTKPLPYTRDKEKGKKFGFSLLWRSLSRKEKPKTEHSSFSAQFPPEEWPVRDEDDLDNIPRDVEHEIIKRINPILTVDNLIKHTVLMQKYEEQKKYNSQGTSTDMLTIGHKYPSKEGVKKRQGLSAKPQGQGHSRRDRHKARNQGSEFQPGSIRLEKHPKLPATQPIPRIKSPNEMVGQKPLGEITTVLGSHLIYKKRISNPFQGLSHRGSTISKGHKIQKTSDLKPSQTGPKEKPFQKPRSLDSSRIFDGKAKEPYAEQPNDKMEAESIYINDPTVKPINDDFRGHLFSHPQQSMLQNDGKCCPFMESMLRYEVYGGENEVIPEVLRKSHSHFDKLGETKQTPHSLPSRGASFSDRTPSACRLVDNTIHQFQNLGLLDYPVGVNPLRQAARQDKDSEELLRKGFVQDAETTSLENEQLSNDDQALYQNEVEDDDGACSSLYLEEDDISENDDLRQMLPGHSQYSFTGGSQGNHLGKQKVIERSLTEYNSTMERVESQVLKRNECYKPTGLHATPGESQEPNLSAESCGLNSGAQFGFNYEEEPSVAKCVQASAPADERIFDYYSARKASFEAEVIQDTIGDTGKKPASWSQSPQNQEMRKHFPQKFQLFNTSHMPVLAQDVQYEHSHLEGTENHSMAGDSGIDSPRTQSLGSNNSVILDGLKRRQNFLQNVEGTKSSQPLTSNSLLPLTPVINV

SEQ ID NO: 12942 - protein, 989 aa, Homo Sapiens; identical to SEQ ID NO: 12941

SEQ ID NO: 12943 - protein, 1101 aa, Homo Sapiens
MARPVQLAPGSLALVLCRLEAQKAAGAAEEPGGRAVFRAFRRANARCFWNARLARAASRLAFQGWLRRGVLLVRAPPACLQVLRDAWRRRALRPPRGFRIRAVGECGTRRGGASRPVQLAPGSLALVLCRLEAQKAAGAAEEPGGRAVFRAFRRANARCFWNARLARAASRLAFQGWLRRGVLLVRAPPACLQVLRDAWRRRALRPPRGFRIRAVGDVFPVQMNPITQSQFVPLGEVLCCAISDMNTAQIVVTQESLLERLMKHYPGIAIPSEDILYTTLGTLIKERKIYHTGEGYFIVTPQTYFITNTTTQENKRMLPSDESRLMPASMTYLVSMESCAESAQENAAPISHCQSCQCFRDMHTQDVQEAPVAAEVTRKSHRGLGESVSWVQNGAVSVSAEHHICESTKPLPYTRDKEKGKKFGFSLLWRSLSRKEKPKTEHSSFSAQFPPEEWPVRDEDDLDNIPRDVEHEIIKRINPILTVDNLIKHTVLMQKYEEQKKYNSQGTSTDMLTIGHKYPSKEGVKKRQGLSAKPQGQGHSRRDRHKARNQGSEFQPGSIRLEKHPKLPATQPIPRIKSPNEMVGQKPLGEITTVLGSHLIYKKRISNPFQGLSHRGSTISKGHKIQKTSDLKPSQTGPKEKPFQKPRSLDSSRIFDGKAKEPYAEQPNDKMEAESIYINDPTVKPINDDFRGHLFSHPQQSMLQNDGKCCPFMESMLRYEVYGGENEVIPEVLRKSHSHFDKLGETKQTPHSLPSRGASFSDRTPSACRLVDNTIHQFQNLGLLDYPVGVNPLRQAARQDKDSEELLRKGFVQDAETTSLENEQLSNDDQALYQNEVEDDDGACSSLYLEEDDISENDDLRQMLPGHSQYSFTGGSQGNHLGKQKVIERSLTEYNSTMERVESQVLKRNECYKPTGLHATPGESQEPNLSAESCGLNSGAQFGFNYEEEPSVAKCVQASAPADERIFDYYSARKASFEAEVIQDTIGDTGKKPASWSQSPQNQEMRKHFPQKFQLFNTSHMPVLAQDVQYEHSHLEGTENHSMAGDSGIDSPRTQSLGSNNSVILDGLKRRQNFLQNVEGTKSSQPLTSNSLLPLTPVINV

SEQ ID NO: 12944 - protein, 969 aa, Homo Sapiens
MALSLWPLLLLLLLLLLLSFAVTLAPTGPHSLDPGLSFLKSLLSTLDQAPQGSLSRSRFFTFLANISSSFEPGRMGEGPVGEPPPLQPPALRLHDFLVTLRGSPDWEPMLGLLGDMLALLGQEQTPRDFLVHQAGVLGGLVEVLLGALVPGGPPTPTRPPCTRDGPSDCVLAADWLPSLLLLLEGTRWQALVQVQPSVDPTNATGLDGREAAPHFLQGLLGLLTPTGELGSKEALWGGLLRTVGAPLYAAFQEGLLRVTHSLQDEVFSILGQPEPDTNGQCQGGNLQQLLLWGVRHNLSWDVQALGFLSGSPPPPPALLHCLSTGVPLPRASQPSAHISPRQRRAITVEALCENHLGPAPPYSISNFSIHLLCQHTKPATPQPHPSTTAICQTAVWYAVSWAPGAQGWLQACHDQFPDEFLDAICSNLSFSALSGSNRRLVKRLCAGLLPPPTSCPEGLPPVPLTPDIFWGCFLENETLWAERLCGEASLQAVPPSNQAWVQHVCQGPTPDVTASPPCHIGPCGERCPDGGSFLVMVCANDTMYEVLVPFWPWLAGQCRISRGGNDTCFLEGLLGPLLPSLPPLGPSPLCLTPGPFLLGMLSQLPRCQSSVPALAHPTRLHYLLRLLTFLLGPGAGGAEAQGMLGRALLLSSLPDNCSFWDAFRPEGRRSVLRTIGEYLEQDEEQPTPSGFEPTVNPSSGISKMELLACFSPVLWDLLQREKSVWALQILVQAYLHMPPENLQQLVLSAEREAAQGFLTLMLQGKLQGKLQVPPSEEQALGRLTALLLQRYPRLTSQLFIDLSPLIPFLAVSDLMRFPPSLLANDSVQQGYRGSEENSLEEDKGLRPMTPRSLAAIRDYSPGMRPEQKEALAKRLLAPELFGEVPAWPQELLWAVLPLLPHLPLENFLQLSPHQIQALEDSWPAAGLGPGHARHVLRSLVNQSVQDGEEQVRRWHMNFWVCCAHLEERC

SEQ ID NO: 12945 - protein, 351 aa, Homo Sapiens
MALSLWPLLLLLLLLLLLSFAVTLAPTGPHSLDPGLSFLKSLLSTLDQAPQGSLSRSRFFTFLANISSSFEPGRMGEGPVGEPPPLQPPALRLHDFLVTLRGSPDWEPMLGLLGDMLALLGQEQTPRDFLVHQAGVLGGLVEVLLGALVPGGPPTPTRPPCTRDGPSDCVLAADWLPSLLLLLEGTRWQALVQVQPSVDPTNATGLDGREAAPHFLQGLLGLLTPTGELGSKEALWGGLLRTVGAPLYAAFQEGLLRVTHSLQDEVFSILGQPEPDTNGQCQGGNLQQLLLWGVRHNLSWDVQALGFLSGSPPPPPALLHCLSTGVPLPRASQPSAHISPRQRRAITVEAL

SEQ ID NO: 12946 - protein, 1775 aa, Homo Sapiens
MALSLWPLLLLLLLLLLLSFAVTLAPTGPHSLDPGLSFLKSLLSTLDQAPQGSLSRSRFFTFLANISSSFEPGRMGEGPVGEPPPLQPPALRLHDFLVTLRGSPDWEPMLGLLGDMLALLGQEQTPRDFLVHQAGVLGGLVEVLLGALVPGGPPTPTRPPCTRDGPSDCVLAADWLPSLLLLLEGTRWQALVQVQPSVDPTNATGLDGREAAPHFLQGLLGLLTPTGELGSKEALWGGLLRTVGAPLYAAFQEGLLRVTHSLQDEVFSILGQPEPDTNGQCQGGNLQQLLLWGVRHNLSWDVQALGFLSGSPPPPPALLHCLSTGVPLPRASQPSAHISPRQRRAITVEALCENHLGPAPPYSISNFSIHLLCQHTKPATPQPHPSTTAICQTAVWYAVSWAPGAQGWLQACHDQFPDEFLDAICSNLSFSALSGSNRRLVKRLCAGLLPPPTSCPEGLPPVPLTPDIFWGCFLENETLWAERLCGEASLQAVPPSNQAWVQHVCQGPTPDVTASPPCHIGPCGERCPDGGSFLVMVCANDTMYEVLVPFWPWLAGQCRISRGGNDTCFLEGLLGPLLPSLPPLGPSPLCLTPGPFLLGMLSQLPRCQSSVPALAHPTRLHYLLRLLTFLLGPGAGGAEAQGMLGRALLLSSLPDNCSFWDAFRPEGRRSVLRTIGEYLEQDEEQPTPSGFEPTVNPSSGISKMELLACFSPVLWDLLQREKSVWALQILVQAYLHMPPENLQQLVLSAEREAAQGFLTLMLQGKLQGKLQVPPSEEQALGRLTALLLQRYPRLTSQLFIDLSPLIPFLAVSDLMRFPPSLLANDSVLAAIRDYSPGMRPEQKEALAKRLLAPELFGEVPAWPQELLWAVLPLLPHLPLENFLQLSPHQIQALEDSWPAAGLGPGHARHVLRSLVNQSVQDGEEQVRRLGPLACFLSPEELQSLVPLSDPTGPVERGLLECAANGTLSPEGRVAYELLGVLRSSGGAVLSPRELRVWAPLFSQLGLRFLQELSEPQLRAMLPVLQGTSVTPAQAVLLLGRLLPRHDLSLEELCSLHLLLPGLSPQTLQAIPRRVLVGACSCLAPELSRLSACQTAALLQTFRVKDGVKNMGTTGAGPAVCIPGQPIPTTWPDCLLPLLPLKLLQLDSLALLANRRRYWELPWSEQQAQFLWKKMQVPTNLTLRNLQALGTLAGGMSCEFLQQINSMVDFLEVVHMIYQLPTRVRGSLRACIWAELQRRMAMPEPEWTTVGPELNGLDSKLLLDLPIQLMDRLSNESIMLVVELVQRAPEQLLALTPLHQAALAERALQNLAPKETPVSGEVLETLGPLVGFLGTESTRQIPLQILLSHLSQLQGFCLGETFATELGWLLLQESVLGKPELWSQDEVEQAGRLVFTLSTEAISLIPREALGPETLERLLEKQQSWEQSRVGQLCREPQLAAKKAALVAGVVRPAAEDLPEPVPNCADVRGTFPAAWSATQIAEMELSDFEDCLTLFAGDPGLGPEELRAAMGKAKQLWGPPRGFRPEQILQLGRLLIGLGDRELQELILVDWGVLSTLGQIDGWSTTQLRIVVSSFLRQSGRHVSHLDFVHLTALGYTLCGLRPEELQHISSWEFSQAALFLGTLHLQCSEEQLEVLAHLLVLPGGFGPISNWGPEIFTEIGTIAAGIPDLALSALLRGQIQGVTPLAISVIPPPKFAVVFSPIQLSSLTSAQAVAVTPEQMAFLSPEQRRAVAWAQHEGKESPEQQGRSTAWGLQDWSRPSWSLVLTISFLGHLL

SEQ ID NO: 12947 - protein, 1002 aa, Homo Sapiens
MELLACFSPVLWDLLQREKSVWALQILVQAYLHMPPENLQQLVLSAEREAAQGFLTLMLQGKLQGKLQVPPSEEQALGRLTALLLQRYPRLTSQLFIDLSPLIPFLAVSDLMRFPPSLLANDSVQQGYRGSEENSLEEDKGLRPMTPRSLAAIRDYSPGMRPEQKEALAKRLLAPELFGEVPAWPQELLWAVLPLLPHLPLENFLQLSPHQIQALEDSWPAAGLGPGHARHVLRSLVNQSVQDGEEQVRRLGPLACFLSPEELQSLVPLSDPTGPVERGLLECAANGTLSPEGRVAYELLGVLRSSGGAVLSPRELRVWAPLFSQLGLRFLQELSEPQLRAMLPVLQGTSVTPAQAVLLLGRLLPRHDLLQLDSLALLANRRRYWELPWSEQQAQFLWKKMQVPTNLTLRNLQALGTLAGGMSCEFLQQINSMVDFLEVVHMIYQLPTRVRGSLRACIWAELQRRMAMPEPEWTTVGPELNGLDSKLLLDLPIQLMDRLSNESIMLVVELVQRAPEQLLALTPLHQAALAERALQNLAPKETPVSGEVLETLGPLVGFLGTESTRQIPLQILLSHLSQLQGFCLGETFATELGWLLLQESVLGKPELWSQDEVEQAGRLVFTLSTEAISLIPREALGPETLERLLEKQQSWEQSRVGQLCREPQLAAKKAALVAGVVRPAAEDLPEPVPNCADVRGTFPAAWSATQIAEMELSDFEDCLTLFAGDPGLGPEELRAAMGKAKQLWGPPRGFRPEQILQLGRLLIGLGDRELQELILVDWGVLSTLGQIDGWSTTQLRIVVSSFLRQSGRHVSHLDFVHLTALGYTLCGLRPEELQHISSWEFSQAALFLGTLHLQCSEEQLEVLAHLLVLPGGFGPISNWGPEIFTEIGTIAAGIPDLALSALLRGQIQGVTPLAISVIPPPKFAVVFSPIQLSSLTSAQAVAVTPEQMAFLSPEQRRAVAWAQHEGKESPEQQGRSTAWGLQDWSRPSWSLVLTISFLGHLL

SEQ ID NO: 12948 - protein, 663 aa, Homo Sapiens
TFLANISSSFEPGRMGEGPVGEPPPLQPPALRLHDFLVTLRGSPDWEPMLGLLGDMLALLGQEQTPRDFLVHQAGVLGGLVEVLLGALVPGGPPTPTRPPCTRDGPSDCVLAADWLPSLLLLLEGTRWQALVQVQPSVDPTNATGLDGREAAPHFLQGLLGLLTPTGELGSKEALWGGLLRTVGAPLYAAFQEGLLRVTHSLQDEVFSILGQPEPDTNGQCQGGNLQQLLLWGVRHNLSWDVQALGFLSGSPPPPPALLHCLSTGVPLPRASQPSAHISPRQRRAITVEALCENHLGPAPPYSISNFSIHLLCQHTKPATPQPHPSTTAICQTAVWYAVSWAPGAQGWLQACHDQFPDEFLDAICSNLSFSALSGSNRRLVKRLCAGLLPPPTSCPEGLPPVPLTPDIFWGCFLENETLWAERLCGEASLQAVPPSNQAWVQHVCQGPTPDVTASPPCHIGPCGERCPDGGSFLVMVCANDTMYEVLVPFWPWLAGQCRISRGGNDTCFLEGLLGPLLPSLPPLGPSPLCLTPGPFLLGMLSQLPRCQSSVPALAHPTRLHYLLRLLTFLLGPGAGGAEAQGMLGRALLLSSLPDNCSFWDAFRPEGRRSVLRTIGEYLEQDEEQPTPSGFEPTVNPSSGISKMELLACFSVSALPEGKLLEQ

SEQ ID NO: 12949 - protein, 119 aa, Homo Sapiens
  misc_feature (1)..(1): Xaa can be any naturally occurring amino acid
XSLAAIRDYSPGMRPEQKEALAKRLLAPELFGEVPAWPQELLWAVLPLLPHLPLENFLQLSPHQIQALEDSWPAAGLGPGHARHVLRSLVNQSVQDGEEQVRRWHMNFWVCCAHLEERC

SEQ ID NO: 12950 - protein, 346 aa, Homo Sapiens
MTATLAAAADIATMVSGSSGLAAARLLSRSFLLPQNGIRHCSYTASRQHLYVDKNTKIICQGFTGKQGTFHSQQALEYGTKLVGGTTPGKGGQTHLGLPVFNTVKEAKEQTGATASVIYVPPPFAAAAINEAIEAEIPLVVCITEGIPQQDMVRVKHKLLRQEKTRLIGPNCPGVINPGECKIGIMPGHIHKKGRIGIVSRSGTLTYEAVHQTTQVGLGQSLCVGIGGDPFNGTDFIDCLEIFLNDSATEGIILIGEIGGNAEENAAEFLKQHNSGPNSKPVVSFIAGLTAPPGRRMGHAGAIIAGGKGGAKEKISALQSAGVVVSMSPAQLGTTIYKEFEKRKML

SEQ ID NO: 12951 - protein, 105 aa, Homo Sapiens
  misc_feature (1)..(1): Xaa can be any naturally occurring amino acid
XTLAAAADIATMVSGSSGLAAARLLSRSFLLPQNGIRHCSYTASRQHLYVDKNTKIICQGFTGKQELLLLTRHLSQPAGIGIWHQTRWRNHSRERRPDTSGLTCL

SEQ ID NO: 12952 - protein, 328 aa, Homo Sapiens
MSAAGLLAPAPAQAGAPPAPEYYPEEDEELESAEDDERSCRGRESDEDTEDASETDLAKHDEEDYVEMKEQMYQDKLASLKRQLQQLQEGTLQEYQKRMKKLDQQYKERIRNAELFLQLETEQVERNYIKEKKAAVKEFEDKKVELKENLIAELEEKKKMIENEKLTMELTGDSMEVKPIMTRKLRRRPNDPVPIPDKRRKPAPAQLNYLLTDEQIMEDLRTLNKLKSPKRPASPSSPEHLPATPAESPAQRFEARIEDGKLYYDKRWYHKSQAIYLESKDNQKLSCVISSVGANEIWVRKTSDSTKMRIYLGQLQRGLFVIRRRSAA

SEQ ID NO: 12953 - protein, 29 aa, Homo Sapiens
MKYSCCALVLAVLGTELLGSLCSTVRSPR

SEQ ID NO: 12954 - protein, 56 aa, Homo Sapiens
MKYSCCALVLAVLGTELLGSLCSTVRSPRFRGRIQQERKNIRPNIILVLTDDQDVE

SEQ ID NO: 12955 - protein, 76 aa, Homo Sapiens
MKYSCCALVLAVLGTELLGSLCSTVRSPRFRGRIQQERKNIRPNIILVLTDDQDVELGSLQVMNKTRKIMEHGGAT

SEQ ID NO: 12956 - protein, 85 aa, Homo Sapiens
MKYSCCALVLAVLGTELLGSLCSTVRSPRFRGRIQQERKNIRPNIILVLTDDQDVELGSLQVMNKTRKIMEHGGATFINAFVTTP

SEQ ID NO: 12957 - protein, 172 aa, Homo Sapiens
MKYSCCALVLAVLGTELLGSLCSTVRSPRFRGRIQQERKNIRPNIILVLTDDQDVELGSLQVMNKTRKIMEHGGATFINAFVTTPMCCPSRSSMLTGKYVHNHNVYTNNENCSSPSWQAMHEPRTFAVYLNNTGYRTAFFGKYLNEYNGSYIPPGWREWLGLIKNSRFYNYT

SEQ ID NO: 12958 - protein, 871 aa, Homo Sapiens
MKYSCCALVLAVLGTELLGSLCSTVRSPRFRGRIQQERKNIRPNIILVLTDDQDVELGSLQVMNKTRKIMEHGGATFINAFVTTPMCCPSRSSMLTGKYVHNHNVYTNNENCSSPSWQAMHEPRTFAVYLNNTGYRTAFFGKYLNEYNGSYIPPGWREWLGLIKNSRFYNYTVCRNGIKEKHGFDYAKDYFTDLITNESINYFKMSKRMYPHRPVMMVISHAAPHGPEDSAPQFSKLYPNASQHITPSYNYAPNMDKHWIMQYTGPMLPIHMEFTNILQRKRLQTLMSVDDSVERLYNMLVETGELENTYIIYTADHGYHIGQFGLVKGKSMPYDFDIRVPFFIRGPSVEPGSIVPQIVLNIDLAPTILDIAGLDTPPDVDGKSVLKLLDPEKPGNRFRTNKKAKIWRDTFLVERGKFLRKKEESSKNIQQSNHLPKYERVKELCQQARYQTACEQPGQKWQCIEDTSGKLRIHKCKGPSDLLTVRQSTRNLYARGFHDKDKECSCRESGYRASRSQRKSQRQFLRNQGTPKYKPRFVHTRQTRSLSVEFEGEIYDINLEEEEELQVLQPRNIAKRHDEGHKGPRDLQASSGGNRGRMLADSSNAVGPPTTVRVTHKCFILPNDSIHCERELYQSARAWKDHKAYIDKEIEALQDKIKNLREVRGHLKRRKPEECSCSKQSYYNKEKGVKKQEKLKSHLHPFKEAAQEVDSKLQLFKENNRRRKKERKEKRRQRKGEECSLPGLTCFTHDNNHWQTAPFWNLGSFCACTSSNNNTYWCLRTVNETHNFLFCEFATGFLEYFDMNTDPYQLTNTVHTVERGILNQLHVQLMELRSCQGYKQCNPRPKNLDVGNKDGGSYDLHRGQLWDGWEG

SEQ ID NO: 12959 - protein, 871 aa, Homo Sapiens; identical to SEQ ID NO: 12958

SEQ ID NO: 12960 - protein, 871 aa, Homo Sapiens; identical to SEQ ID NO: 12958

SEQ ID NO: 12961 - protein, 871 aa, Homo Sapiens; identical to SEQ ID NO: 12958

SEQ ID NO: 12962 - protein, 669 aa, Homo Sapiens
MVISHAAPHGPEDSAPQFSKLYPNASQHITPSYNYAPNMDKHWIMQYTGPMLPIHMEFTNILQRKRLQTLMSVDDSVERLYNMLVETGELENTYIIYTADHGYHIGQFGLVKGKSMPYDFDIRVPFFIRGPSVEPGSIVPQIVLNIDLAPTILDIAGLDTPPDVDGKSVLKLLDPEKPGNRFRTNKKAKIWRDTFLVERGKFLRKKEESSKNIQQSNHLPKYERVKELCQQARYQTACEQPGQKWQCIEDTSGKLRIHKCKGPSDLLTVRQSTRNLYARGFHDKDKECSCRESGYRASRSQRKSQRQFLRNQGTPKYKPRFVHTRQTRSLSVEFEGEIYDINLEEEEELQVLQPRNIAKRHDEGHKGPRDLQASSGGNRGRMLADSSNAVGPPTTVRVTHKCFILPNDSIHCERELYQSARAWKDHKAYIDKEIEALQDKIKNLREVRGHLKRRKPEECSCSKQSYYNKEKGVKKQEKLKSHLHPFKEAAQEVDSKLQLFKENNRRRKKERKEKRRQRKGEECSLPGLTCFTHDNNHWQTAPFWNLGSFCACTSSNNNTYWCLRTVNETHNFLFCEFATGFLEYFDMNTDPYQLTNTVHTVERGILNQLHVQLMELRSCQGYKQCNPRPKNLDVGNKDGGSYDLHRMLLFLVPCSAPLTSRAMVSDASF

SEQ ID NO: 12963 - protein, 131 aa, Homo Sapiens
  misc_feature (1)..(1): Xaa can be any naturally occurring amino acid
XREVRGHLKRRKPEECSCSKQSYYNKEKGVKKQEKLKSHLHPFKEAAQEVDSKLQLFKENNRRRKKERKEKRRQRKGEECSLPGLTCFTHDNNHWQTAPFWNPHKYSAHGRTRHFESATRTTNGAQKLSRI

SEQ ID NO: 12964 - protein, 189 aa, Homo Sapiens
MGPPSLVLCLLSATVFSLLGGSSAFLSHHRLKGRFQRDRRNIRPNIILVLTDDQDVELGSMQVMNKTRRIMEQGGAHFINAFVTTPMCCPSRSSILTGKYVHNHNTYTNNENCSSPSWQAQHESRTFAVYLNSTGYRTAFFGKYLNEYNGSYVPPGWKEWVGLLKNSRFYNYTLCRNGVKEKHGSDYSK

SEQ ID NO: 12965 - protein, 870 aa, Homo Sapiens
MGPPSLVLCLLSATVFSLLGGSSAFLSHHRLKGRFQRDRRNIRPNIILVLTDDQDVELGSMQVMNKTRRIMEQGGAHFINAFVTTPMCCPSRSSILTGKYVHNHNTYTNNENCSSPSWQAQHESRTFAVYLNSTGYRTAFFGKYLNEYNGSYVPPGWKEWVGLLKNSRFYNYTLCRNGVKEKHGSDYSKDYLTDLITNDSVSFFRTSKKMYPHRPVLMVISHAAPHGPEDSAPQYSRLFPNASQHITPSYNYAPNPDKHWIMRYTGPMKPIHMEFTNMLQRKRLQTLMSVDDSMETIYNMLVETGELDNTYIVYTADHGYHIGQFGLVKGKSMPYEFDIRVPFYVRGPNVEAGCLNPHIVLNIDLAPTILDIAGLDIPADMDGKSILKLLDTERPVNRFHLKKKMRVWRDSFLVERGKLLHKRDNDKVDAQEENFLPKYQRVKDLCQRAEYQTACEQLGQKWQCVEDATGKLKLHKCKGPMRLGGSRALSNLVPKYYGQGSEACTCDSGDYKLSLAGRRKKLFKKKYKASYVRSRSIRSVAIEVDGRVYHVGLGDAAQPRNLTKRHWPGAPEDQDDKDGGDFSGTGGLPDYSAANPIKVTHRCYILENDTVQCDLDLYKSLQAWKDHKLHIDHEIETLQNKIKNLREVRGHLKKKRPEECDCHKISYHTQHKGRLKHRGSSLHPFRKGLQEKDKVWLLREQKRKKKLRKLLKRLQNNDTCSMPGLTCFTHDNQHWQTAPFWTLGPFCACTSANNNTYWCMRTINETHNFLFCEFATGFLEYFDLNTDPYQLMNAVNTLDRDVLNQLHVQLMELRSCKGYKQCNPRTRNMDLGLKDGGSYEQYRQFQRRKWPEMKRPSSKSLGQLWEGWEG

SEQ ID NO: 12966 - protein, 870 aa, Homo Sapiens; identical to SEQ ID NO: 12965

SEQ ID NO: 12967 - protein, 867 aa, Homo Sapiens
MGPPSLVLCLLSATVFSLLGGSSAFLSHHRLKGRFQRDRRNIRPNIILVLTDDQDVELGSMQVMNKTRRIMEQGGAHFINAFVTTPMCCPSRSSILTGKYVHNHNTYTNNENCSSPSWQAQHESRTFAVYLNSTGYRTAFFGKYLNEYNGSYVPPGWKEWVGLLKNSRFYNYTLCRNGVKEKHGSDYSKDYLTDLITNDSVSFFRTSKKMYPHRPVLMVISHAAPHGPEDSAPQYSRLFPNASQHITPSYNYAPNPDKHWIMRYTGPMKPIHMEFTNMLQRKRLQTLMSVDDSMETIYNMLVETGELDNTYIVYTADHGYHIGQFGLVKGKSMPYEFDIRVPFYVRGPNVEAGCLNPHIVLNIDLAPTILDIAGLDIPADMDGKSILKLLDTERPVNRFHLKKKMRVWRDSFLVERGKLLHKRDNDKVDAQEENFLPKYQRVKDLCQRAEYQTACEQLGQKWQCVEDATGKLKLHKCKGPMRLGGSRALSNLVPKYYGQGSEACTCDSGDYKLSLAGRRKKLFKKKYKASYVRSRSIRSVAIEVDGRVYHVGLGDAAQPRNLTKRHWPGAPEDQDDKDGGDFSGTGGLPDYSAANPIKVTHRCYILENDTVQCDLDLYKSLQAWKDHKLHIDHEIETLQNKIKNLREVRGHLKKKRPEECDCHKISYHTQHKGRLKHRGSSLHPFRKGLQEKDKVWLLREQKRKKKLRKLLKRLQNNDTCSMPGLTCFTHDNQHWQTAPFWTLGPFCACTSANNNTYWCMRTINETHNFLFCEFATGFLEYFDLNTDPYQLMNAVNTLDRDVLNQLHVQLMELRSCKGYKQCNPRTRNMDLDGGSYEQYRQFQRRKWPEMKRPSSKSLGQLWEGWEG

SEQ ID NO: 12968 - protein, 207 aa, Homo Sapiens
  misc_feature (1)..(1): Xaa can be any naturally occurring amino acid
XEVRGHLKKKRPEECDCHKISYHTQHKGRLKHRGSSLHPFRKGLQEKDKVWLLREQKRKKKLRKLLKRLQNNDTCSMPGLTCFTHDNQHWQTAPFWTLGPFCACTSANNNTYWCMRTINETHNFLFCEFATGFLEYFDLNTDPYQLMNAVNTLDRDVLNQLHVQLMELRSCKGYKQCNPRTRNMDLGLKDGGSYEQYRGQLWEGWEG

SEQ ID NO: 12969 - protein, 374 aa, Homo Sapiens
MAAPALGLVCGRCPELGLVLLLLLLSLLCGAAGSQEAGTGAGAGSLAGSCGCGTPQRPGAHGSSAAAHRYSREANAPGPVPGERQLAHSKMVPIPAGVFTMGTDDPQIKQDGEAPARRVTIDAFYMDAYEVSNTEFEKFVNSTGYLTEAEKFGDSFVFEGMLSEQVKTNIQQAVAAAPWWLPVKGANWRHPEGPDSTILHRPDHPVLHVSWNDAVAYCTWAGKRLPTEAEWEYSCRGGLHNRLFPWGNKLQPKGQHYANIWQGEFPVTNTGEDGFQGTAPVDAFPPNGYGLYNIVGNAWEWTSDWWTVHHSVEETLNPKGPPSGKDRVKKGGSYMCHRSYCYRYRCAARSQNTPDSSASNLGFRCAADRLPTMD

SEQ ID NO: 12970 - protein, 354 aa, Homo Sapiens
MAAPALGLVCGRCPELGLVLLLLLLSLLCGAAGSQEAGTGAGAGSLAGSCGCGTPQRPGAHGSSAAAHRYSREANAPGPVPGERQLAHSKMVPIPAGVFTMGTDDPQIKQDGEAPARRVTIDAFYMDAYEVSNTEFEKFVNSTGYLTEAEKFGDSFVFEGMLSEQVKTNIQQAVAAAPWWLPVKGANWRHPEGPDSTILHRPDHPVLHVSWNDAVAYCTWAGKRLPTEAEWEYSCRGGLHNRLFPWGNKLQPKGQHYANIWQGEFPVTNTGEDGFQGTAPVDAFPPNGYGLYNIVGNAWEWTSDWWTVHHSVEETLNPSYCYRYRCAARSQNTPDSSASNLGFRCAADRLPTMD

SEQ ID NO: 12971 - protein, 426 aa, Homo Sapiens
MAAPALGLVCGRCPELGLVLLLLLLSLLCGAAGSQEAGTGAGAGSLAGSCGCGTPQRPGAHGSSAAAHRYSREANAPGPVPGERQLAHSKMVPIPAGVFTMGTDDPQIKQDGEAPARRVTIDAFYMDAYEVSNTEFEKFVNSTGYLTEAEKFGDSFVFEGMLSEQVKTNIQQAVAAAPWWLPVKGANWRHPEGPDSTILHRPDHPVLHVSWNDAVAYCTWAGKRLPTEAEWEYSCRGGLHNRLFPWGNKLQPKGQHYANIWQGEFPVTNTGEDGFQGTAPVDAFPPNGYGLYNIVGNAWEWTSDWWTVHHSVEETLNPKGPPSGKDRVKKGGSYMCHRSQEYYDPYFQDVASEMLRRHTASRWKAFSSLEPCCSIRRHQQYAAIERLTCGKFELRCASLRKIDCLNTNIACSYSMRQDGPRLHCVD

SEQ ID NO: 12972 - protein, 349 aa, Homo Sapiens
MAAPALGLVCGRCPELGLVLLLLLLSLLCGAAGSQEAGTGAGAGSLAGSCGCGTPQRPGAHGSSAAAHRYSREANAPGPVPGERQLAHSKMVPIPAGVFTMGTDDPQIKQDGEAPARRVTIDAFYMDAYEVSNTEFEKFVNSTGYLTEVAAAPWWLPVKGANWRHPEGPDSTILHRPDHPVLHVSWNDAVAYCTWAGKRLPTEAEWEYSCRGGLHNRLFPWGNKLQPKGQHYANIWQGEFPVTNTGEDGFQGTAPVDAFPPNGYGLYNIVGNAWEWTSDWWTVHHSVEETLNPKGPPSGKDRVKKGGSYMCHRSYCYRYRCAARSQNTPDSSASNLGFRCAADRLPTMD

SEQ ID NO: 12973 - protein, 242 aa, Homo Sapiens
MAAPALGLVCGRCPELGLVLLLLLLSLLCGAAGSQEAGTGAGAGSLAGSCGCGTPQRPGAHGSSAAAHRYSREANAPGPVPGERQLAHSKMVPIPAGVFTMGTDDPQIKQDGEAPARRVTIDAFYMDAYEVSNTEFEKFVNSTGYLTEVDAFPPNGYGLYNIVGNAWEWTSDWWTVHHSVEETLNPKGPPSGKDRVKKGGSYMCHRSYCYRYRCAARSQNTPDSSASNLGFRCAADRLPTMD

SEQ ID NO: 12974 - protein, 304 aa, Homo Sapiens
HGLPLLPLLSLLVGAWLKLGNGQATSMVQLQGGRFLMGTNSPDSRDGDGPVREATVKPFAIDIFPVTNKDFRDFVREKKYRTEAEMFGWSFVFEDFVSDELRNKATQPMKSGRCLCWAGASCSRSPSFSQSVLWWLPVEKAFWRQPAGPGSGIRERLEHPVLHVSWNDARAYCAWRGKRLPTEEEWEFAARGGLKGQVYPWGNWFQPNRTNLWQGKFPKGDKAEDGFHGVSPVNAFPAQNNYGLYDLLGNVWEWTASPYQAAEQDMRVLRGASWIDTADGSANHRARVTTRMGNTPDSASDNLG

SEQ ID NO: 12975 - protein, 51 aa, Homo Sapiens
MARHGLPLLPLLSLLVGAWLKLGILSGRKSIGQKLRCLDGALSLRTLSLMS

SEQ ID NO: 12976 - protein, 232 aa, Homo Sapiens
MARHGLPLLPLLSLLVGAWLKLGNGQATSMVQLQGGRFLMGTNSPDSRDGDGPVREATVKPFAIDIFPVTNKDFRDFVREKKYRTEAEMFGWSFVFEDFVSDELRNKATQPMKSVLWWLPVEKAFWRQGKFPKGDKAEDGFHGVSPVNAFPAQNNYGLYDLLGNVWEWTASPYQAAEQDMRVLRGASWIDTADGSANHRARVTTRMGNTPDSASDNLGFRCAADAGRPPGEL

SEQ ID NO: 12977 - protein, 183 aa, Homo Sapiens
MARHGLPLLPLLSLLVGAWLKLGNGQATSMVQLQGGRFLMGTNSPDSRDGDGPVREATVKPFAIDIFPVTNKDFRDFVREKKYRTEAEMFGWSFVFEDFVSDELRNKATQPMKSVLWWLPVEKAFWRQPAGPGSGIRERLEHPVLHVKFTHGGTGSSQTAPTCGRESSPRETKLRMASMESPQ

SEQ ID NO: 12978 - protein, 352 aa, Homo Sapiens
MARHGLPLLPLLSLLVGAWLKLGNGQATSMVQLQGGRFLMGTNSPDSRDGDGPVREATVKPFAIDIFPVTNKDFRDFVREKKYRTEAEMFGWSFVFEDFVSDELRNKATQPMKSVLWWLPVEKAFWRQPAGPGSGIRERLEHPVLHVSWNDARAYCAWRGKRLPTEEEWEFAARGGLKGQVYPWGNWFQPNRTNLWQGKFPKGDKAEDGFHGVSPVNAFPAQNNYGLYDLLGNVWEWTASPYQAAEQDMRVLRGASWIDTADGSANHRARVTTRVLLCCPGWSAVAQSQLTTASNCQALAILPPQLLKYLGLQDGQHSRFSLRQPRFPLCCRRRPAARGAVSSRVVTRRKAF

SEQ ID NO: 12979 - protein, 165 aa, Homo Sapiens
MARHGLPLLPLLSLLVGAWLKLGNGQATSMVQLQGGRFLMGTNSPDSRDGDGPVREATVKPFAIDIFPVTNKDFRDFVREKKYRTEAEMFGWSFVFEDFVSDELRNKATQPMKSVLWWLPVEKAFWRQVKFTHGGTGSSQTAPTCGRESSPRETKLRMASMESPQ

SEQ ID NO: 12980 - protein, 150 aa, Homo Sapiens
MARHGLPLLPLLSLLVGAWLKLGNGQATSMVQLQGGRFLMGTNSPDSRDGDGPVREATVKPFAIDIFPVTNKDFRDFVREKKYRTEAEMFGWSFVFEDFVSDELRNKATQPMKVKFTHGGTGSSQTAPTCGRESSPRETKLRMASMESPQ

SEQ ID NO: 12981 - protein, 102 aa, Homo Sapiens
MARHGLPLLPLLSLLVGAWLKLGNGQATSMVQLQGGRFLMGTNSPDSRDGDGPVREATVKPFAIDIFPVTNKDFRSSLPMGELVPAKPHQPVAGKVPQGRQS

SEQ ID NO: 12982 - protein, 213 aa, Homo Sapiens
MFGWSFVFEDFVSDELRNKATQPMKSVLWWLPVEKAFWRQPAGPGSGIRERLEHPVLHVSWNDARAYCAWRGKRLPTEEEWEFAARGGLKGQVYPWGNWFQPNRTNLWQGKFPKGDKAEDGFHGVSPVNAFPAQNNYGLYDLLGNVWEWTASPYQAAEQDMRVLRGASWIDTADGSANHRARVTTRMGNTPDSASDNLGFRCAADAGRPPGEL

SEQ ID NO: 12983 - protein, 236 aa, Homo Sapiens
MRAHAQRGRGCTRRSAAVLMARHGLPLLPLLSLLVGAWLKLGNGQATSMVQLQGGRFLMGTNSPDSRDGDGPVREATVKPFAIDIFPVTNKDFRDFVREKKYRTEAEMFGWSFVFEDFVSDELRNKATQPMKGKFPKGDKAEDGFHGVSPVNAFPAQNNYGLYDLLGNVWEWTASPYQAAEQDMRVLRGASWIDTADGSANHRARVTTRMGNTPDSASDNLGFRCAADAGRPPGEL

SEQ ID NO: 12984 - protein, 305 aa, Homo Sapiens
MRAHAQRGRGCTRRSAAVLMARHGLPLLPLLSLLVGAWLKLGNGQATSMVQLQGGRFLMGTNSPDSRDGDGPVREATVKPFAIDIFPVTNKDFRDFVREKKYRTEAEMFGWSFVFEDFVSDELRNKATQPMKPAGPGSGIRERLEHPVLHVSWNDARAYCAWRGKRLPTEEEWEFAARGGLKGQVYPWGNWFQPNRTNLWQGKFPKGDKAEDGFHGVSPVNAFPAQNNYGLYDLLGNVWEWTASPYQAAEQDMRVLRGASWIDTADGSANHRARVTTRMGNTPDSASDNLGFRCAADAGRPPGEL

SEQ ID NO: 12985 - protein, 320 aa, Homo Sapiens
MRAHAQRGRGCTRRSAAVLMARHGLPLLPLLSLLVGAWLKLGNGQATSMVQLQGGRFLMGTNSPDSRDGDGPVREATVKPFAIDIFPVTNKDFRDFVREKKYRTEAEMFGWSFVFEDFVSDELRNKATQPMKSVLWWLPVEKAFWRQPAGPGSGIRERLEHPVLHVSWNDARAYCAWRGKRLPTEEEWEFAARGGLKGQVYPWGNWFQPNRTNLWQGKFPKGDKAEDGFHGVSPVNAFPAQNNYGLYDLLGNVWEWTASPYQAAEQDMRVLRGASWIDTADGSANHRARVTTRMGNTPDSASDNLGFRCAADAGRPPGEL

SEQ ID NO: 12986 - protein, 358 aa, Homo Sapiens
MRAHAQRGRGCTRRSAAVLMARHGLPLLPLLSLLVGAWLKLGNGQATSMVQLQGGRFLMGTNSPDSRDGDGPVREATVKPFAIDIFPVTNKDFRDFVREKKYRTEAEMFGWSFVFEDFVSDELRNKATQPMKSVLWWLPVEKAFWRQPAGPGSGIRERLEHPVLHVSWNDARAYCAWRGKRLPTEEEWEFAARGGLKGQVYPWGNWFQPNRTNLWQGKFPKGDKAEDGFHGVSPVNAFPAQNNYGWATLQIQPQTTSVSAVLQTQAGRQGSCKQPGGDKEKSLLGSLSFPGHVANSAIPSSRASASGKNFPFPVSHPSVAGASHQGRRGLSLLCFGEGAQCVLTMAGGQVFLLEAKYY

SEQ ID NO: 12987 - protein, 294 aa, Homo Sapiens
MRAHAQRGRGCTRRSAAVLMARHGLPLLPLLSLLVGAWLKLGNGQATSMVQLQGGRFLMGTNSPDSRDGDGPVREATVKPFAIDIFPVTNKDFRYIRDFVREKKYRTEAEMFGWSFVFEDFVSDELRNKATQPMKSVLWWLPVEKAFWRQPAGPGSGIRERLEHPVLHVSWNDARAYCAWRGKRLPTEEEWEFAARGGLKGQVYPWGNWFQPNRTNLWQGKFPKGDKAEDGFHGVSPVNAFPAQNNYGLYDLLGNVWEWTASPYQAAEQDMRVLRGASWIDTADGSANHRARVT

SEQ ID NO: 12988 - protein, 747 aa, Homo Sapiens
MGRGPWDAGPSRRLLPLLLLLGLARGAAGAPGPDGLDVCATCHEHATCQQREGKKICICNYGFVGNGRTQCVDKNECQFGATLVCGNHTSCHNTPGGFYCICLEGYRATNNNKTFIPNDGTFCTDIDECEVSGLCRHGGRCVNTHGSFECYCMDGYLPRNGPEPFHPTTDATSCTEIDCGTPPEVPDGYIIGNYTSSLGSQVRYACREGFFSVPEDTVSSCTGLGTWESPKLHCQEINCGNPPEMRHAILVGNHSSRLGGVARYVCQEGFESPGGKITSVCTEKGTWRESTLTCTEILTKINDVSLFNDTCVRWQINSRRINPKISYVISIKGQRLDPMESVREETVNLTTDSRTPEVCLALYPGTNYTVNISTAPPRRSMPAVIGFQTAEVDLLEDDGSFNISIFNETCLKLNRRSRKVGSEHMYQFTVLGQRWYLANFSHATSFNFTTREQVPVVCLDLYPTTDYTVNVTLLRSPKRHSVQITIATPPAVKQTISNISGFNETCLRWRSIKTADMEEMYLFHIWGQRWYQKEFAQEMTFNISSSSRDPEVCLDLRPGTNYNVSLRALSSELPVVISLTTQITEPPLPEVEFFTVHRGPLPRLRLRKAKEKNGPISSYQVLVLPLALQSTFSCDSEGASSFFSNASDADGYVAAELLAKDVPDDAMEIPIGDRLYYGEYYNAPLKRGSDYCIILRITSEWNKVRRHSCAVWAQVKDSSLMLLQMAGVGLGSLAVVIILTFLSFSAV

SEQ ID NO: 12989 - protein, 757 aa, Homo Sapiens
MGRGPWDAGPSRRLLPLLLLLGLARGAAGAPGPDGLDVCATCHEHATCQQREGKKICICNYGFVGNGRTQCVDKNECQFGATLVCGNHTSCHNTPGGFYCICLEGYRATNNNKTFIPNDGTFCTDIDECEVSGLCRHGGRCVNTHGSFECYCMDGYLPRNGPEPFHPTTDATSCTEIDCGTPPEVPDGYIIGNYTSSLGSQVRYACREGFFSVPEDTVSSCTGLGTWESPKLHCQEINCGNPPEMRHAILVGNHSSRLGGVARYVCQEGFESPGGKITSVCTEKGTWRESTLTCTEILTKINDVSLFNDTCVRWQINSRRINPKISYVISIKGQRLDPMESVREETVNLTTDSRTPEVCLALYPGTNYTVNISTAPPRRSMPAVIGFQTAEVDLLEDDGSFNISIFNETCLKLNRRSRKVGSEHMYQFTVLGQRWYLANFSHATSFNFTTREQVPVVCLDLYPTTDYTVNVTLLRSPKRHSVQITIATPPAVKQTISNISGFNETCLRWRSIKTADMEEMYLFHIWGQRWYQKEFAQEMTFNISSSSRDPEVCLDLRPGTNYNVSLRALSSELPVVISLTTQITEPPLPEVEFFTVHRGPLPRLRLRKAKEKNGPISSYQVLVLPLALQSTFSCDSEGASSFFSNASDADGYVAAELLAKDVPDDAMEIPIGDRLYYGEYYNAPLKRGSDYCIILRITSEWNKVRRHSCAVWAQVKEIPCNCNFLRLHIHRANSGDTQIRHSCCCRWRVLDWVPWLL

SEQ ID NO: 12990 - protein, 722 aa, Homo Sapiens
MGRGPWDAGPSRRLLPLLLLLGLARGAAGAPGPDGLDVCATCHEHATCQQREGKKICICNYGFVGNGRTQCVDKNECQFGATLVCGNHTSCHNTPGGFYCICLEGYRATNNNKTFIPNDGTFCTDIDECEVSGLCRHGGRCVNTHGSFECYCMDGYLPRNGPEPFHPTTDATSCTEIDCGTPPEVPDGYIIGNYTSSLGSQVRYACREGFFSVPEDTVSSCTGLGTWESPKLHCQEINCGNPPEMRHAILVGNHSSRLGGVARYVCQEGFESPGGKITSVCTEKGTWRESTLTCTEILTKINDVSLFNDTCVRWQINSRRINPKISYVISIKGQRLDPMESVREETVNLTTDSRTPEVCLALYPGTNYTVNISTAPPRRSMPAVIGFQTAEVDLLEDDGSFNISIFNETCLKLNRRSRKVGSEHMYQFTVLGQRWYLANFSHATSFNFTTREQVPVVCLDLYPTTDYTVNVTLLRSPKRHSVQITIATPPAVKQTISNISGFNETCLRWRSIKTADMEEMYLFHIWGQRWYQKEFAQEMTFNISSSSRDPEVCLDLRPGTNYNVSLRALSSELPVVISLTTQITEPPLPEVEFFTVHRGPLPRLRLRKAKEKNGPISSYQVLVLPLALQSTFSCDSEGASSFFSNASDADGYVAAELLAKDVPDDAMEIPIGDRLYYGEYYNAPLKRGSDYCIILRITSEWNKIRHSCCCRWRVLDWVPWLL

SEQ ID NO: 12991 - protein, 45 aa, Homo Sapiens
VITALYYESQVNGISIKFILMRSVYIIVTGDQNPIHTTLSKELHS

SEQ ID NO: 12992 - protein, 281 aa, Homo Sapiens
  misc_feature (1)..(1): Xaa can be any naturally occurring amino acid
XGYIIGNYTSSLGSQVRYACREGFFSVPEDTVSSCTGLGTWESPKLHCQEINCGNPPEMRHAILVGNHSSRLGGVARYVCQEGFESPGGKITSVCTEKGTWRESTLTCTEILTKINDVSLFNDTCVRWQINSRRINPKISYVISIKGQRLDPMESVREETVNLTTDSRTPEVCLALYPGTNYTVNISTAPPRRSMPAVIGFQTAGSRNSHGRNTHIKEVDLLEDDGSFNISIFNETCLKLNRRSRKVGSEHMYQFTVLGQRWYLANFSHATSFNFTTREQV

SEQ ID NO: 12993 - protein, 706 aa, Homo Sapiens
  misc_feature (1)..(1): Xaa can be any naturally occurring amino acid
XLLLLGLARGAAGAPGPDGLDVCATCHEHATCQQREGKKICICNYGFVGNGRTQCVDKNECQFGATLVCGNHTSCHNTPGGFYCICLEGYRATNNNKTFIPNDGTFCTDIDECEVSGLCRHGGRCVNTHGSFECYCMDGYLPRNGPEPFHPTTDATSCTEIDCGTPPEVPDGYIIGNYTSSLGSQVRYACREGFFSVPEDTVSSCTGLGTWESPKLHCQEINCGNPPEMRHAILVGNHSSRLGGVARYVCQEGFESPGGKITSVCTEKGTWRESTLTCTEILTKINDVSLFNDTCVRWQINSRRINPKISYVISIKGQRLDPMESVREETVNLTTDSRTPEVCLALYPGTNYTVNISTAPPRRSMPAVIGFQTAEVDLLEDDGSFNISIFNETCLKLNRRSRKVGSEHMYQFTVLGQRWYLANFSHATSFNFTTREQVPVVCLDLYPTTDYTVNVTLLRSPKRHSVQITIATPPAVKQTISNISGFNETCLRWRSIKTADMEEMYLFHIWGQRWYQKEFAQEMTFNISSSSRDPEVCLDLRPGTNYNVSLRALSSELPVVISLTTQITEPPLPEVEFFTVHRGPLPRLRLRKAKEKNGPISSYQVLVLPLALQSTFSCDSEGASSFFSNASDADGYVAAELLAKDVPDDAMEIPIGDRLYYGEYYNAPLKRGSDYCIILRITSEWNKIRHSCCCRWRVLDWVPWLL

SEQ ID NO: 12994 - protein, 629 aa, Homo Sapiens
MTAEGPSPPARWHRRLPGLWAAALLLLGLPRLSVRADGKFFVLESQNGSQGLQLEAARLSCKSRGAHLASADELRRVVQDCSFAVCTTGWLADGTLGTTVCSKGSGEQQIMRAVDVRIESNPVPGGTYSALCIKDEEKPCGDPPSFPHTILQGRTGLEMGDELLYVCAPGHIMGHRETAFTLLCNSCGEWYGLVQACGKDEAEAHIDYEDNFPDDRSVSFRELMEDSRTEADEDRGQGDSSEEAPKQDRLVSISVGRENIARDKVFVPTTGLPGAGSSVPADSPGSRLLQKHLFWFPAEAFHKPGLEKEVDDDTKKQFSAGDNHSGVKLVPGEPETKVIYGNTDGPSGPFVGKNDSKAGDPVVSSSDESWLDGYPVTEGAWRKTEAEEEEDGDRGDGSVGLDENVLVTPDQPILVEVKKPKSSTLTPSEGMTHSSVLPSQMLDVEALALRPVNASETEGIGDGDLTKYQSTLPWRFITEESPMATLSYELTSSTLEILTVNTVKQTPNHIPSTIMATTQPPVETTVPEIQDSFPYLLSEDFFGQEGPGPGASEELHPTLESCVGDGCPGLSRGPVIATIVTVLCLLLLLAGVGMVWGYRKCQHKSSVYKLNVGQRQARHYHQQIEMEKV

SEQ ID NO: 12995 - protein, 243 aa, Homo Sapiens
  misc_feature (1)..(1): Xaa can be any naturally occurring amino acid
XAEGPSPPARWHRRLPGLWAAALLLLGLPRLSVRADGKFFVLESQNGSQGLQLEAARLSCKSRGAHLASADELRRVVQDCSFAVCTTGWLADGTLGTTVCSKGSGEQQIMRAVDVRIESNPVPGGTYSALCIKDEDEAEAHIDYEDNFPDDRSVSFRELMEDSRTEADEDRGQGDSSEEAPKQDRLVSISVGRENIARDKVFVPTTGLPGAGSSVPADSPGSRLLQKHLFWFPAEAFHKPGLE

SEQ ID NO: 12996 - protein, 3571 aa, Homo Sapiens
MWPRLAFCCWGLALVSGWATFQQMSPSRNFSFRLFPETAPGAPGSIPAPPAPGDEAAGSRVERLGQAFRRRVRLLRELSERLELVFLVDDSSSVGEVNFRSELMFVRKLLSDFPVVPTATRVAIVTFSSKNYVVPRVDYISTRRARQHKCALLLQEIPAISYRGGGTYTKGAFQQAAQILLHARENSTKVVFLITDGYSNGGDPRPIAASLRDSGVEIFTFGIWQGNIRELNDMASTPKEEHCYLLHSFEEFEALARRALHEDLPSGSFIQDDMVHCSYLCDEGKDCCDRMGSCKCGTHTGHFECICEKGYYGKGLQYECTACPSGTYKPEGSPGGISSCIPCPDENHTSPPGSTSPEDCVCREGYRASGQTCELVHCPALKPPENGYFIQNTCNNHFNAACGVRCHPGFDLVGSSIILCLPNGLWSGSESYCRVRTCPHLRQPKHGHISCSTREMLYKTTCLVACDEGYRLEGSDKLTCQGNSQWDGPEPRCVERHCSTFQMPKDVIISPHNCGKQPAKFGTICYVSCRQGFILSGVKEMLRCTTSGKWNVGVQAAVCKDVEAPQINCPKDIEAKTLEQQDSANVTWQIPTAKDNSGEKVSVHVHPAFTPPYLFPIGDVAIVYTATDLSGNQASCIFHIKVIDAEPPVIDWCRSPPPVQVSEKVHAASWDEPQFSDNSGAELVITRSHTQGDLFPQGETIVQYTATDPSGNNRTCDIHIVIKGSPCEIPFTPVNGDFICTPDNTGVNCTLTCLEGYDFTEGSTDKYYCAYEDGVWKPTYTTEWPDCAKKRFANHGFKSFEMFYKAARCDDTDLMKKFSEAFETTLGKMVPSFCSDAEDIDCRLEENLTKKYCLEYNYDYENGFAIGPGGWGAANRLDYSYDDFLDTVQETATSIGNAKSSRIKRSAPLSDYKIKLIFNITASVPLPDERNDTLEWENQQRLLQTLETITNKLKRTLNKDPMYSFQLASEILIADSNSLETKKASPFCRPGSVLRGRMCVNCPLGTYYNLEHFTCESCRIGSYQDEEGQLECKLCPSGMYTEYIHSRNISDCKAQCKQGTYSYSGLETCESCPLGTYQPKFGSRSCLSCPENTSTVKRGAVNISACGVPCPEGKFSRSGLMPCHPCPRDYYQPNAGKAFCLACPFYGTTPFAGSRSITECSSFSSTFSAAEESVVPPASLGHIKKRHEISSQVFHECFFNPCHNSGTCQQLGRGYVCLCPLGYTGLKCETDIDECSPLPCLNNGVCKDLVGEFICECPSGYTGQRCEENINECSSSPCLNKGICVDGVAGYRCTCVKGFVGLHCETEVNECQSNPCLNNAVCEDQVGGFLCKCPPGFLGTRCGKNVDECLSQPCKNGATCKDGANSFRCLCAAGFTGSHCELNINECQSNPCRNQATCVDELNSYSCKCQPGFSGKRCETEQSTGFNLDFEVSGIYGYVMLDGMLPSLHALTCTFWMKSSDDMNYGTPISYAVDNGSDNTLLLTDYNGWVLYVNGREKITNCPSVNDGRWHHIAITWTSANGIWKVYIDGKLSDGGAGLSVGLPIPGGGALVLGQEQDKKGEGFSPAESFVGSISQLNLWDYVLSPQQVKSLATSCPEELSKGNVLAWPDFLSGIVGKVKIDSKSIFCSDCPRLGGSVPHLRTASEDLKPGSKVNLFCDPGFQLVGNPVQYCLNQGQWTQPLPHCERISCGVPPPLENGFHSADDFYAGSTVTYQCNNGYYLLGDSRMFCTDNGSWNGVSPSCLDVDECAVGSDCSEHASCLNVDGSYICSCVPPYTGDGKNCAEPIKCKAPGNPENGHSSGEIYTVGAEVTFSCQEGYQLMGVTKITCLESGEWNHLIPYCKAVSCGKPAIPENGCIEELAFTFGSKVTYRCNKGYTLAGDKESSCLANSSWSHSPPVCEPVKCSSPENINNGKYILSGLTYLSTASYSCDTGYSLQGPSIIECTASGIWDRAPPACHLVFCGEPPAIKDAVITGNNFTFRNTVTYTCKEGYTLAGLDTIECLADGKWSRSDQQCLAVSCDEPPIVDHASPETAHRLFGDIAFYYCSDGYSLADNSQLLCNAQGKWVPPEGQDMPRCIAHFCEKPPSVSYSILESVSKAKFAAGSVVSFKCMEGFVLNTSAKIECMRGGQWNPSPMSIQCIPVRCGEPPSIMNGYASGSNYSFGAMVAYSCNKGFYIKGEKKSTCEATGQWSSPIPTCHPVSCGEPPKVENGFLEHTTGRIFESEVRYQCNPGYKSVGSPVFVCQANRHWHSESPLMCVPLDCGKPPPIQNGFMKGENFEVGSKVQFFCNEGYELVGDSSWTCQKSGKWNKKSNPKCMPAKCPEPPLLENQLVLKELTTEVGVVTFSCKEGHVLQGPSVLKCLPSQQWNDSFPVCKIVLCTPPPLISFGVPIPSSALHFGSTVKYSCVGGFFLRGNSTTLCQPDGTWSSPLPECVPVECPQPEEIPNGIIDVQGLAYLSTALYTCKPGFELVGNTTTLCGENGHWLGGKPTCKAIECLKPKEILNGKFSYTDLHYGQTVTYSCNRGFRLEGPSALTCLETGDWDVDAPSCNAIHCDSPQPIENGFVEGADYSYGAIIIYSCFPGFQVAGHAMQTCEESGWSSSIPTCMPIDCGLPPHIDFGDCTKLKDDQGYFEQEDDMMEVPYVTPHPPYHLGAVAKTWENTKESPATHSSNFLYGTMVSYTCNPGYELLGNPVLICQEDGTWNGSAPSCISIECDLPTAPENGFLRFTETSMGSAVQYSCKPGHILAGSDLRLCLENRKWSGASPRCEAISCKKPNPVMNGSIKGSNYTYLSTLYYECDPGYVLNGTERRTCQDDKNWDEDEPICIPVDCSSPPVSANGQVRGDEYTFQKEIEYTCNEGFLLEGARSRVCLANGSWSGATPDCVPVRCATPPQLANGVTEGLDYGFMKEVTFHCHEGYILHGAPKLTCQSDGNWDAEIPLCKPVNCGPPEDLAHGFPNGFSFIHGGHIQYQCFPGYKLHGNSSRRCLSNGSWSGSSPSCLPCRCSTPVIEYGTVNGTDFDCGKAARIQCFKGFKLLGLSEITCEADGQWSSGFPHCEHTSCGSLPMIPNAFISETSSWKENVITYSCRSGYVIQGSSDLICTEKGVWSQPYPVCEPLSCGSPPSVANAVATGEAHTYESEVKLRCLEGYTMDTDTDTFTCQKDGRWFPERISCSPKKCPLPENITHILVHGDDFSVNRQVSVSCAEGYTFEGVNISVCQLDGTWEPPFSDESCSPVSCGKPESPEHGFVVGSKYTFESTIIYQCEPGYELEGNRERVCQENRQWSGGVAICKETRCETPLEFLNGKADIENRTTGPNVVYSCNRGYSLEGPSEAHCTENGTWSHPVPLCKPNPCPVPFVIPENALLSEKEFYVDQNVSIKCREGFLLQGHGIITCNPDETWTQTSAKCEKISCGPPAHVENAIARGVHYQYGDMITYSCYSGYMLEGFLRSVCLENGTWTSPPICRAVCRFPCQNGGICQRPNACSCPEGWMGRLCEEPICILPCLNGGRCVAPYQCDCPPGWTGSRCHTAVCQSPCLNGGKCVRPNRCHCLSSWTGHNCSRKRRTGF

SEQ ID NO: 12997 - protein, 868 aa, Homo Sapiens
MWPRLAFCCWGLALVSGWATFQQMSPSRNFSFRLFPETAPGAPGSIPAPPAPGDEAAGSRVERLGQAFRRRVRLLRELSERLELVFLVDDSSSVGEVNFRSELMFVRKLLSDFPVVPTATRVAIVTFSSKNYVVPRVDYISTRRARQHKCALLLQEIPAISYRGGGTYTKGAFQQAAQILLHARENSTKVVFLITDGYSNGGDPRPIAASLRDSGVEIFTFGIWQGNIRELNDMASTPKEEHCYLLHSFEEFEALARRALHEDLPSGSFIQDDMVHCSYLCDEGKDCCDRMGSCKCGTHTGHFECICEKGYYGKGLQYECTACPSGTYKPEGSPGGISSCIPCPDENHTSPPGSTSPEDCVCREGYRASGQTCELVHCPALKPPENGYFIQNTCNNHFNAACGVRCHPGFDLVGSSIILCLPNGLWSGSESYCRVRTCPHLRQPKHGHISCSTREMLYKTTCLVACDEGYRLEGSDKLTCQGNSQWDGPEPRCVERHCSTFQMPKDVIISPHNCGKQPAKFGTICYVSCRQGFILSGVKEMLRCTTSGKWNVGVQAAVCKDVEAPQINCPKDIEAKTLEQQDSANVTWQIPTAKDNSGEKVSVHVHPAFTPPYLFPIGDVAIVYTATDLSGNQASCIFHIKVIDAEPPVIDWCRSPPPVQVSEKVHAASWDEPQFSDNSGAELVITRSHTQGDLFPQGETIVQYTATDPSGNNRTCDIHIVIKGSPCEIPFTPVNGDFICTPDNTGVNCTLTCLEGYDFTEGSTDKYYCAYEDGVWKPTYTTEWPDCAKKRFANHGFKSFEMFYKAARCDDTDLMKKFSEAFETTLGKMVPSFCSDAEDIDCRLEENLTKKYCLEYNYDYENGFAIGN

SEQ ID NO: 12998 - protein, 3574 aa, Homo Sapiens
MWPRLAFCCWGLALVSGWATFQQMSPSRNFSFRLFPETAPGAPGSIPAPPAPGDEAAGSRVERLGQAFRRRVRLLRELSERLELVFLVDDSSSVGEVNFRSELMFVRKLLSDFPVVPTATRVAIVTFSSKNYVVPRVDYISTRRARQHKCALLLQEIPAISYRGGGTYTKGAFQQAAQILLHARENSTKVVFLITDGYSNGGDPRPIAASLRDSGVEIFTFGIWQGNIRELNDMASTPKEEHCYLLHSFEEFEALARRALHEDLPSGSFIQDDMVHCSYLCDEGKDCCDRMGSCKCGTHTGHFECICEKGYYGKGLQYECTACPSGTYKPEGSPGGISSCIPCPDENHTSPPGSTSPEDCVCREGYRASGQTCELVHCPALKPPENGYFIQNTCNNHFNAACGVRCHPGFDLVGSSIILCLPNGLWSGSESYCRVRTCPHLRQPKHGHISCSTREMLYKTTCLVACDEGYRLEGSDKLTCQGNSQWDGPEPRCVERHCSTFQMPKDVIISPHNCGKQPAKFGTICYVSCRQGFILSGVKEMLRCTTSGKWNVGVQAAVCKDVEAPQINCPKDIEAKTLEQQDSANVTWQIPTAKDNSGEKVSVHVHPAFTPPYLFPIGDVAIVYTATDLSGNQASCIFHIKVIDAEPPVIDWCRSPPPVQVSEKVHAASWDEPQFSDNSGAELVITRSHTQGDLFPQGETIVQYTATDPSGNNRTCDIHIVIKGSPCEIPFTPVNGDFICTPDNTGVNCTLTCLEGYDFTEGSTDKYYCAYEDGVWKPTYTTEWPDCAKKRFANHGFKSFEMFYKAARCDDTDLMKKFSEAFETTLGKMVPSFCSDAEDIDCRLEENLTKKYCLEYNYDYENGFAIGPGGWGAANRLDYSYDDFLDTVQETATSIGNAKSSRIKRSAPLSDYKIKLIFNITASVPLPDERNDTLEWENQQRLLQTLETITNKLKRTLNKDPMYSFQLASEILIADSNSLETKKASPFCRPGSVLRGRMCVNCPLGTYYNLEHFTCESCRIGSYQDEEGQLECKLCPSGMYTEYIHSRNISDCKAQCKQGTYSYSGLETCESCPLGTYQPKFGSRSCLSCPENTSTVKRGAVNISACGVPCPEGKFSRSGLMPCHPCPRDYYQPNAGKAFCLACPFYGTTPFAGSRSITECSSFSSTFSAAEESVVPPASLGHIKKRHEISSQVFHECFFNPCHNSGTCQQLGRGYVCLCPLGYTGLKCETDIDECSPLPCLNNGVCKDLVGEFICECPSGYTGQRCEENINECSSSPCLNKGICVDGVAGYRCTCVKGFVGLHCETEVNECQSNPCLNNAVCEDQVGGFLCKCPPGFLGTRCGKNVDECLSQPCKNGATCKDGANSFRCLCAAGFTGSHCELNINECQSNPCRNQATCVDELNSYSCKCQPGFSGKRCETEQSTGFNLDFEVSGIYGYVMLDGMLPSLHALTCTFWMKSSDDMNYGTPISYAVDNGSDNTLLLTDYNGWVLYVNGREKITNCPSVNDGRWHHIAITWTSANGIWKVYIDGKLSDGGAGLSVGLPIPGMLGGGALVLGQEQDKKGEGFSPAESFVGSISQLNLWDYVLSPQQVKSLATSCPEELSKGNVLAWPDFLSGIVGKVKIDSKSIFCSDCPRLGGSVPHLRTASEDLKPGSKVNLFCDPGFQLVGNPVQYCLNQGQWTQPLPHCERISCGVPPPLENGFHSADDFYAGSTVTYQCNNGYYLLGDSRMFCTDNGSWNGVSPSCLDVDECAVGSDCSEHASCLNVDGSYICSCVPPYTGDGKNCAEPIKCKAPGNPENGHSSGEIYTVGAEVTFSCQEGYQLMGVTKITCLESGEWNHLIPYCKAVSCGKPAIPENGCIEELAFTFGSKVTYRCNKGYTLAGDKESSCLANSSWSHSPPVCEPVKCSSPENINNGKYILSGLTYLSTASYSCDTGYSLQGPSIIECTASGIWDRAPPACHLVFCGEPPAIKDAVITGNNFTFRNTVTYTCKEGYTLAGLDTIECLADGKWSRSDQQCLAVSCDEPPIVDHASPETAHRLFGDIAFYYCSDGYSLADNSQLLCNAQGKWVPPEGQDMPRCIAHFCEKPPSVSYSILESVSKAKFAAGSVVSFKCMEGFVLNTSAKIECMRGGQWNPSPMSIQCIPVRCGEPPSIMNGYASGSNYSFGAMVAYSCNKGFYIKGEKKSTCEATGQWSSPIPTCHPVSCGEPPKVENGFLEHTTGRIFESEVRYQCNPGYKSVGSPVFVCQANRHWHSESPLMCVPLDCGKPPPIQNGFMKGENFEVGSKVQFFCNEGYELVGDSSWTCQKSGKWNKKSNPKCMPAKCPEPPLLENQLVLKELTTEVGVVTFSCKEGHVLQGPSVLKCLPSQQWNDSFPVCKIVLCTPPPLISFGVPIPSSALHFGSTVKYSCVGGFFLRGNSTTLCQPDGTWSSPLPECVPVECPQPEEIPNGIIDVQGLAYLSTALYTCKPGFELVGNTTTLCGENGHWLGGKPTCKAIECLKPKEILNGKFSYTDLHYGQTVTYSCNRGFRLEGPSALTCLETGDWDVDAPSCNAIHCDSPQPIENGFVEGADYSYGAIIIYSCFPGFQVAGHAMQTCEESGWSSSIPTCMPIDCGLPPHIDFGDCTKLKDDQGYFEQEDDMMEVPYVTPHPPYHLGAVAKTWENTKESPATHSSNFLYGTMVSYTCNPGYELLGNPVLICQEDGTWNGSAPSCISIECDLPTAPENGFLRFTETSMGSAVQYSCKPGHILAGSDLRLCLENRKWSGASPRCEAISCKKPNPVMNGSIKGSNYTYLSTLYYECDPGYVLNGTERRTCQDDKNWDEDEPICIPVDCSSPPVSANGQVRGDEYTFQKEIEYTCNEGFLLEGARSRVCLANGSWSGATPDCVPVRCATPPQLANGVTEGLDYGFMKEVTFHCHEGYILHGAPKLTCQSDGNWDAEIPLCKPVNCGPPEDLAHGFPNGFSFIHGGHIQYQCFPGYKLHGNSSRRCLSNGSWSGSSPSCLPCRCSTPVIEYGTVNGTDFDCGKAARIQCFKGFKLLGLSEITCEADGQWSSGFPHCEHTSCGSLPMIPNAFISETSSWKENVITYSCRSGYVIQGSSDLICTEKGVWSQPYPVCEPLSCGSPPSVANAVATGEAHTYESEVKLRCLEGYTMDTDTDTFTCQKDGRWFPERISCSPKKCPLPENITHILVHGDDFSVNRQVSVSCAEGYTFEGVNISVCQLDGTWEPPFSDESCSPVSCGKPESPEHGFVVGSKYTFESTIIYQCEPGYELEGNRERVCQENRQWSGGVAICKETRCETPLEFLNGKADIENRTTGPNVVYSCNRGYSLEGPSEAHCTENGTWSHPVPLCKPNPCPVPFVIPENALLSEKEFYVDQNVSIKCREGFLLQGHGIITCNPDETWTQTSAKCEKISCGPPAHVENAIARGVHYQYGDMITYSCYSGYMLEGFLRSVCLENGTWTSPPICRAVCRFPCQNGGICQRPNACSCPEGWMGRLCEEPICILPCLNGGRCVAPYQCDCPPGWTGSRCHTAVCQSPCLNGGKCVRPNRCHCLSSWTGHNCSRKRRTGF

SEQ ID NO: 12999 - protein, 229 aa, Homo Sapiens
MPAAGPPLLLLGTPGSGKTALLFAAALEAAGEGQGPVLFLTRRPLQSMPRGTGTTLDPMRLQKIRFQYPPSTRELFRLLCSAHEAPGPAPSLLLLDGLEEYLAEDPEPQEAAYLIALLLDTAAHFSHRLGPGRDCGLMVALQTQEEAGSGDVLHLALLQRYFPAQCWLQPDAPGPGEHGLRACLEPGGLGPRTEWWVTFRSDGEMMIAPWPTQAGDPSSGKGSSSGGQP

SEQ ID NO: 13000 - protein, 352 aa, Homo Sapiens
MFRGLSSWLGLQQPVAGGGQPNGDAPPEQPSETVAESAEEELQQAGDQELLHQAKDFGNYLFNFASAATKKITESVAETAQTIKKSVEEGKIDGIIDKTIIGDFQKEQKKFVEEQHTKKSEAAVPPWVDTNDEETIQQQILALSADKRNFLRDPPAGVQFNFDFDQMYPVALVMLQEDELLSKMRFALVPKLVKEEVFWRNYFYRVSLIKQSAQLTALAAQQQAAGKEEKSNGREQDLPLAEAVRPKTPPVVIKSQLKTQEDEEEISTSPGVSEFVSDAFDACNLNQEDLRKEMEQLVLDKKQEETAVLEEDSADWEKELQQELQEYEVVTESEKRDENWDKEIEKMLQEEN

SEQ ID NO: 13001 - protein, 134 aa, Homo Sapiens
MSPLRPLLLALALASVPCAQGACPASADLKHSDGTRTCAKLYDKSDPYYENCCGGAELSLESGADLPYLPSNWANTASSLVVAPRCELTVWSRQGKAGKTHKFSAGTYPRLEEYRRGILGDWSNAISALYCRCS

SEQ ID NO: 13002 - protein, 111 aa, Homo Sapiens
MKILVALAVFFLVSTQLFAEEIGANDDLNYWSDWYDSDQIKEELPEPFEHLLQRIARRPKPQQFFGLMGKRDADSSIEKQVALLKALYGHGQISHKMAYERSAMQNYERRR

SEQ ID NO: 13003 - protein, 129 aa, Homo Sapiens
MKILVALAVFFLVSTQLFAEEIGANDDLNYWSDWYDSDQIKEELPEPFEHLLQRIARRPKPQQFFGLMGKRDADSSIEKQVALLKALYGHGQISHKRHKTDSFVGLMGKRALNSVAYERSAMQNYERRR

SEQ ID NO: 13004 - protein, 114 aa, Homo Sapiens
MKILVALAVFFLVSTQLFAEEIGANDDLNYWSDWYDSDQIKEELPEPFEHLLQRIARRPKPQQFFGLMGKRDAGHGQISHKRHKTDSFVGLMGKRALNSVAYERSAMQNYERRR

SEQ ID NO: 13005 - protein, 103 aa, Homo Sapiens
MRIMLLFTAILAFSLAQSFGAVCKEPQEEVVPGGGRSKRDPDLYQLLQRLFKSHSSLEGLLKALSQASTDPKESTSPEKHSPTDVNQENVPSFGILKYPPRAE

SEQ ID NO: 13006 - protein, 103 aa, Homo Sapiens; identical to SEQ ID NO: 13005

SEQ ID NO: 13007 - protein, 103 aa, Homo Sapiens; identical to SEQ ID NO: 13005

SEQ ID NO: 13008 - protein, 121 aa, Homo Sapiens
MRIMLLFTAILAFSLAQSFGAVCKEPQEEVVPGGGRSKRDPDLYQLLQRLFKSHSSLEGLLKALSQASTDPKESTSPEKRDMHDFFVGLMGKRSVQPDSPTDVNQENVPSFGILKYPPRAE

SEQ ID NO: 13009 - protein, 121 aa, Homo Sapiens; identical to SEQ ID NO: 13008

SEQ ID NO: 13010 - protein, 121 aa, Homo Sapiens; identical to SEQ ID NO: 13008

SEQ ID NO: 13011 - protein, 121 aa, Homo Sapiens; identical to SEQ ID NO: 13008

SEQ ID NO: 13012 - protein, 135 aa, Homo Sapiens
MRIMLLFTAILAFSLAQSFGAVCKEPQEEVVPGGGRSKRDPDLYQLLQRLFKSHSSLEGLLKALSQASTDPKESTSPEKRDMHDFFVGLMGKRSVQPEGKTGPFLPSVRVPRPLHPNQLGSTGKSSLGTEEQRPL

SEQ ID NO: 13013 - protein, 135 aa, Homo Sapiens; identical to SEQ ID NO: 13012

SEQ ID NO: 13014 - protein, 135 aa, Homo Sapiens; identical to SEQ ID NO: 13012

SEQ ID NO: 13015 - protein, 96 aa, Homo Sapiens
MLPCLALLLLMELSVCTVAGDGGEEQTLSTEAETWEGAGPSIQLQLQEVKTGKASQFFGLMGKRVGAYQLEHTFQGLLGKRSLFTEGREDEAQGSE

SEQ ID NO: 13016 - protein, 76 aa, Homo Sapiens
MLPCLALLLLMELSVCTVAGDGGEEQTLSTEAETWEGAGPSIQLQLQEVKTGKASQFFGLMGKRVGGREDEAQGSE

SEQ ID NO: 13017 - protein, 107 aa, Homo Sapiens
MLPCLALLLLMELSVCTVAGDGGEEQTLSTEAETWEGAGPSIQLQLQEVKTGKASQFFGLMGKRVGGRPLIQPRRKKAYQLEHTFQGLLGKRSLFTEGREDEAQGSE

SEQ ID NO: 13018 - protein, 87 aa, Homo Sapiens
MLPCLALLLLMELSVCTVAGDGGEEQTLSTEAETWEGAGPSIQLQLQEVKTGKASQFFGLMGKRVGGRPLIQPRRKKGREDEAQGSE

SEQ ID NO: 13019 - protein, 113 aa, Homo Sapiens
MLPCLALLLLMELSVCTVAGDGGEEQTLSTEAETWVIVALEEGAGPSIQLQLQEVKTGKASQFFGLMGKRVGGRPLIQPRRKKAYQLEHTFQGLLGKRSLFTEGREDEAQGSE

SEQ ID NO: 13020 - protein, 53 aa, Homo Sapiens
MLPCLALLLLMELSVCTVAGDGGEEQTLSTEAETWVIVALEVLLGRGSDEGRG

SEQ ID NO: 13021 - protein, 187 aa, Homo Sapiens
MANRGPAYGLSREVQQKIEKQYDADLEQILIQWITTQCRKDVGRPQPGRENFQNWLKDGTVLCELINALYPEGQAPVKKIQASTMAFKQMEQISQFLQAAERYGINTTDIFQTVDLWEGKNMACVQRTLMNLGGLAVARDDGLFSGDPNWFPKKSKENPRNFSDNQLQEGKNVIGLQMGTNRGASQA

SEQ ID NO: 13022 - protein, 199 aa, Homo Sapiens
MANRGPAYGLSREVQQKIEKQYDADLEQILIQWITTQCRKDVGRPQPGRENFQNWLKDGTVLCELINALYPEGQAPVKKIQASTMAFKQMEQISQFLQAAERYGINTTDIFQTVDLWEGKNMACVQRTLMNLGGLAVARDDGLFSGDPNWFPKKSKENPRNFSDNQLQEGKNVIGLQMGTNRGASQAGMTGYGMPRQIL

SEQ ID NO: 13023 - protein, 199 aa, Homo Sapiens; identical to SEQ ID NO: 13022

SEQ ID NO: 13024 - protein, 220 aa, Homo Sapiens
MSAFSLALALVSSPQPPPPIGMANRGPAYGLSREVQQKIEKQYDADLEQILIQWITTQCRKDVGRPQPGRENFQNWLKDGTVLCELINALYPEGQAPVKKIQASTMAFKQMEQISQFLQAAERYGINTTDIFQTVDLWEGKNMACVQRTLMNLGGLAVARDDGLFSGDPNWFPKKSKENPRNFSDNQLQEGKNVIGLQMGTNRGASQAGMTGYGMPRQIL

SEQ ID NO: 13025 - protein, 192 aa, Homo Sapiens
MKSLSLLLAVALDPAGALQAAFRRYPRGAPAPHCEMSRFVPLPASAKWASGLTPAQNCPRALDGAWLMVSISSPVLSLSSLLRPQPEPQQEPVLITMATVVLTVLTHTPAPRVRLGQDALLDLSFAYMPPTSEAASSLAPGPPPFGLEWRRQHLGKGHLLLAATPGLNGQMPAAQEGAVAFAAWDDDEPWGP

SEQ ID NO: 13026 - protein, 156 aa, Homo Sapiens
MKSLSLLLAVALGLATAVSAGPAVIECWFVEDASGKGLAKRPGALLLRQGPGEPPPRPDLDPELYLSVHDPAGALQAAFRRYPRGAPAPHCEMSRFVPLPASAKWASGLTPAQNCPRALDGAWLMVSISSMGHAMPVEFTIPACLPRGAALRSPWR

SEQ ID NO: 13027 - protein, 466 aa, Homo Sapiens
MKSLSLLLAVALGLATAVSAGPAVIECWFVEDASGKGLAKRPGALLLRQGPGEPPPRPDLDPELYLSVHDPAGALQAAFRRYPRGAPAPHCEMSRFVPLPASAKWASGLTPAQNCPRALDGAWLMVSISSPVLSLSSLLRPQPEPQQEPVLITMATVEMGFHHVGQAALELLTSVVLTVLTHTPAPRVRLGQDALLDLSFAYMPPTSEAASSLAPGPPPFGLEWRRQHLGKGHLLLAATPGLNGQMPAAQEGAVAFAAWDDDEPWGPWTGNGTFWLPTVQPFQEGTYLATIHLPYLQGQVTLELAVYKPPKVSLMPATLARAAPGEAPPELLCLVSHFYPSGGLEVEWELRGGPGGRSQKAEGQRWLSALRHHSDGSVSLSGHLQPPPVTTEQHGARYACRIHHPSLPASGRSAEVTLEVAGLSGPSLEDSVGLFLSAFLLLGLFKALGWAAVYLSTCKDSKKKAE

SEQ ID NO: 13028 - protein, 504 aa, Homo Sapiens
MKSLSLLLAVALGLATAVSAGPAVIECWFVEDASGKGLAKRPGALLLRQGPGEPPPRPDLDPELYLSVHDPAGALQAAFRRYPRGAPAPHCEMSRFVPLPASAKWASGLTPAQNCPRALDGAWLMVSISSPVLSLSSLLRPQPEPQQEPVLITMATVVLTVLTHTPAPRVRLGQDALLDLSFAYMPPTSEAASSLAPGPPPFGLEWRRQHLGKGHLLLAATPGLNGQMPAAQEGAVAFAAWDDDEPWGPWTGNGTFWLPTVQPFQEGTYLATIHLPYLQGQVTLELAVYKPPKVSLMPATLARAAPGEAPPELLCLVSHFYPSGGLEVEWELRGGPGGRSQKAEGQRWLSALRHHSDGSVSLSGHLQPPPVTTEQHGARYACRIHHPSLPASGRSAEVTLEVAGLSGPSLEDSVGLFLSAFLLLGLFKALGWAAVYLSTCKDSKKVQCSTSLYLSLVTLSPHPISKPMEGGCWCGRQNLGLEFTLIWVKTWHYILTVGLFEHAT

SEQ ID NO: 13029 - protein, 448 aa, Homo Sapiens
MKSLSLLLAVALGLATAVSAGPAVIECWFVEDASGKGLAKRPGALLLRQGPGEPPPRPDLDPELYLSVHDPAGALQAAFRRYPRGAPAPHCEMSRFVPLPASAKWASGLTPAQNCPRALDGAWLMVSISSPVLSLSSLLRPQPEPQQEPVLITMATVVLTVLTHTPAPRVRLGQDALLDLSFAYMPPTSEAASSLAPGPPPFGLEWRRQHLGKGHLLLAATPGLNGQMPAAQEGAVAFAAWDDDEPWGPWTGNGTFWLPTVQPFQEGTYLATIHLPYLQGQVTLELAVYKPPKVSLMPATLARAAPGEAPPELLCLVSHFYPSGGLEVEWELRGGPGGRSQKAEGQRWLSALRHHSDGSVSLSGHLQPPPVTTEQHGARYACRIHHPSLPASGRSAEVTLEVAGLSGPSLEDSVGLFLSAFLLLGLFKALGWAAVYLSTCKDSKKKAE

SEQ ID NO: 13030 - protein, 361 aa, Homo Sapiens
MKSLSLLLAVALGLATAVSAGPAVIECWFVEDASGKGLAKRPGALLLRQGPGEPPPRPDLDPELYLSVHVVLTVLTHTPAPRVRLGQDALLDLSFAYMPPTSEAASSLAPGPPPFGLEWRRQHLGKGHLLLAATPGLNGQMPAAQEGAVAFAAWDDDEPWGPWTGNGTFWLPTVQPFQEGTYLATIHLPYLQGQVTLELAVYKPPKVSLMPATLARAAPGEAPPELLCLVSHFYPSGGLEVEWELRGGPGGRSQKAEGQRWLSALRHHSDGSVSLSGHLQPPPVTTEQHGARYACRIHHPSLPASGRSAEVTLEVAGLSGPSLEDSVGLFLSAFLLLGLFKALGWAAVYLSTCKDSKKKAE

SEQ ID NO: 13031 - protein, 468 aa, Homo Sapiens
MGTQEGWCLLLCLALSGAAETKPHPAEGQWRAVDVVLDCFLAKDGAHRGALASSEDRARASLVLKQVPVLDDGSLEDFTDFQGGTLAQDDPPIIFEASVDLVQIPQAEALLHADCSGKEVTCEISRYFLQMTETTVKTAAWFMANMQVSGGGPSISLVMKTPRVTKNEALWHPTLNLPLSPQGTVRTAVEFQVMTQTQSLSFLLGSSASLDCGFSMAPGLDLISVEWRLQHKGRGQLVYSWTAGQGQAVRKGATLEPAQLGMARDASLTLPGLTIQDEGTYICQITTSLYRAQQIIQLNIQASPKVRLSLANEALLPTLICDIAGYYPLDVVVTWTREELGGSPAQVSGASFSSLRQSVAGTYSISSSLTAEPGSAGATYTCQVTHISLEEPLGASTQVVPPERRTALGVIFASSLFLLALMFLGLQRRQAPTGLGLLQAERWETTSCADTQSSHLHEDRTARVSQPS

SEQ ID NO: 13032 - protein, 185 aa, Homo Sapiens
MGTQEGWCLLLCLALSGAAETMDLVQIPQAEALLHADCSGKEVTCEISRYFLQMTETTVKTAAWFMANMQVSGGGPSISLVMKTPRVTKNEALWHPTLNLPLSPQGTVRTAVEFQVMTQTQSLSFLLGSSASLDCGFSMAPGLDLISVEWRLQHKGRGRGDLHLPDHHLSVPSSADHPAQHPSFP

SEQ ID NO: 13033 - protein, 96 aa, Homo Sapiens
MDFSSNGKYLATCADDRTIRIWSTKDFLQREHRSMRANVELDHATLVRFSPDCRAFIVWLANGDTLRVFKMTKREDGGYTFTATPEDFPKKHKAPV

SEQ ID NO: 13034 - protein, 43 aa, Homo Sapiens
MELSQMSELMGLSVLLGLLALMATAAVARGWLRAGEERSGRPA

SEQ ID NO: 13035 - protein, 43 aa, Homo Sapiens; identical to SEQ ID NO: 13034

SEQ ID NO: 13036 - protein, 46 aa, Homo Sapiens
MELSQMSELMGLSVLLGLLALMATAAVARGWLRAGEERSGRPACGQ

SEQ ID NO: 13037 - protein, 107 aa, Homo Sapiens
MELSQMSELMGLSVLLGLLALMATAAVARGWLRAGEERSGRPACQKANGFPPDKSSGSKKQKQYQRIRKEKPQQHNFTHRLLAAALKMIAPSASGAPRTSCSESTAA

SEQ ID NO: 13038 - protein, 176 aa, Homo Sapiens
MELSQMSELMGLSVLLGLLALMATAAVARGWLRAGEERSGRPACQKANGFPPDKSSGSKKQKQYQRIRKEKPQQHNFTHRLLAAALKSHSGNISCMDFSSNGKYLATCADDRTIRIWSTKDFLQREHRSMRANVELDHATLSLHRLAGQRGHPPCLQDDQAGGWGLHLHSHPRGLP

SEQ ID NO: 13039 - protein, 447 aa, Homo Sapiens
MELSQMSELMGLSVLLGLLALMATAAVARGWLRAGEERSGRPACQKANGFPPDKSSGSKKQKQYQRIRKEKPQQHNFTHRLLAAALKSHSGNISCMDFSSNGKYLATCADDRTIRIWSTKDFLQREHRSMRANVELDHATLVRFSPDCRAFIVWLANGDTLRVFKMTKREDGGYTFTATPEDFPKKHKAPVIDIGIANTGKFIMTASSDTTVLIWSLKGQVLSTINTNQMNNTHAAVSPCGRFVASCGFTPDVKVWEVCFGKKGEFQEVVRAFELKGHSAAVHSFAFSNDSRRMASVSKDGTWKLWDTDVEYKKKQDPYLLKTGRFEEAAGAAPCRLALSPNAQVLALASGSSIHLYNTRRGEKEECFERVHGECIANLSFDITGRFLASCGDRAVRLFHNTPGHRAMVEEMQGHLKRASNESTRQRLQQQLTQAQETLKSLGALKK

SEQ ID NO: 13040 - protein, 446 aa, Homo Sapiens [sequence omitted]

SEQ ID NO: 13041 - protein, 75 aa, Homo Sapiens
MELSQMSELMGLSVLLGLLALMATAAVARGWLRAGEERSGRPAWPRSFFPVGIGEHLQSFTTCQLCDSIKYLLQK

SEQ ID NO: 13042 - protein, 54 aa, Homo Sapiens
MELSQMSELMGLSVLLGLLALMATAAVARGWLRAGEERSGRPAWSCSVTQDGMQ

SEQ ID NO: 13043 - protein, 64 aa, Homo Sapiens
MGLSFSSGNVSFASRDGDPPCRAKKQMDFHLTNLRDPRSRNNISGFGRRSLNNTTSPTASWLQL

SEQ ID NO: 13044 - protein, 39 aa, Homo Sapiens
MGLSFSSGPRSFFPVGIGEHLQSFTTCQLCDSIKYLLQK

SEQ ID NO: 13045 - protein, 411 aa, Homo Sapiens
MGLSFSSGQKANGFPPDKSSGSKKQKQYQRIRKEKPQQHNFTHRLLAAALKSHSGNISCMDFSSNGKYLATCADDRTIRIWSTKDFLQREHRSMRANVELDHATLVRFSPDCRAFIVWLANGDTLRVFKMTKREDGGYTFTATPEDFPKKHKAPVIDIGIANTGKFIMTASSDTTVLIWSLKGQVLSTINTNQMNNTHAAVSPCGRFVASCGFTPDVKVWEVCFGKKGEFQEVVRAFELKGHSAAVHSFAFSNDSRRMASVSKDGTWKLWDTDVEYKKKQDPYLLKTGRFEEAAGAAPCRLALSPNAQVLALASGSSIHLYNTRRGEKEECFERVHGECIANLSFDITGRFLASCGDRAVRLFHNTPGHRAMVEEMQGHLKRASNESTRQRLQQQLTQAQETLKSLGALKK

SEQ ID NO: 13046 - protein, 385 aa, Homo Sapiens
MAAFLSAGLGILAPSETYPLPTTSSGWEPRLGSPFPSGPCTSSTGAQAVAEPTGQGPKNPRVSRVTVQLEMKPLWEEFNQLGTEMIVTKAGRRMFPPFQVKILGMDSLADYALLMDFIPLDDKRYRYAFHSSAWLVAGKADPATPGRVHFHPDSPAKGAQWMRQIVSFDKLKLTNNLLDDNGHIILNSMHRYQPRFHVVFVDPRKDSERYAQENFKSFIFTETQFTAVTAYQNHRITQLKIASNPFAKGFRESDLDSWPVAPRPLLSVPARSHSSLSPCVLKGATDREKDPNKASASTSKTPAWLHHQLLPPPEVLLAPATYRPVTYQSLYSGAPSHLGIPRTRPAPYPLPNIRADRDQGGLPLPAGLGLLSPTVVCLGPGQDSQ

SEQ ID NO: 13047 - protein, 446 aa, Homo Sapiens
MGKRYMHHPQIQMISTVNLLVIHLLSHQPVCSLALSLCKSYPPHSVSPTDINTSLPPMSSFHRGSTSSSPYVAASHTPPINGSDSILGTRGNAAGSSQTGDALGKALASIYSPDHTSSSFPSNPSTPVGSPSPLTGTSQWPRPGGQAPSSPSYENSLHSLQSRMEDRLDRLDDAIHVLRNHAVGPSTSLPAGHSDIHSLLGPSHNAPIGSLNSNYGGSSLVASSRSASMVGTHREDSVSLNGNHSVLSSTVTTSSTDLNHKTQENYRGGLQSQSGTVVTTEIKTENKEKDENLHEPPSSDDMKSDDESSQKDIKVSSRGRTSSTNEDEDLNPEQKIEREKERRMANNARERLRVRDINEAFKELGRMCQLHLKSEKPQTKLLILHQAVAVILSLEQQVRERNLNPKAACLKRREEEKVSAVSAEPPTTLPGTHPGLSETTNPMGHM

SEQ ID NO: 13048 - protein, 58 aa, Homo Sapiens
MNPQQQRMAAIGTDKELSDLLDFSAMFSPPVNSGKTRPTTLGSSQFSGSGFYRQPSLQ

SEQ ID NO: 13049 - protein, 157 aa, Homo Sapiens
MNPQQQRMAAIGTDKELSDLLDFSAMFSPPVNSGKTRPTTLGSSQFSGSGIDERGGTTSWGTSGQPSPSYDSSRGFTDSPHYSDHLNDSRLGAHEGLSPTPFMNSNLMGKTSERGSFSLYSRDTGLPGCQSSLLRQDLGLGSPAQLSSSGKPGTAYY

SEQ ID NO: 13050 - protein, 682 aa, Homo Sapiens
MNPQQQRMAAIGTDKELSDLLDFSAMFSPPVNSGKTRPTTLGSSQFSGSGIDERGGTTSWGTSGQPSPSYDSSRGFTDSPHYSDHLNDSRLGAHEGLSPTPFMNSNLMGKTSERGSFSLYSRDTGLPGCQSSLLRQDLGLGSPAQLSSSGKPGTAYYSFSATSSRRRPLHDSAALDPLQAKKVRKVPPGLPSSVYAPSPNSDDFNRESPSYPSPKPPTSMFASTFFMQDGTHNSSDLWSSSNGMSQPGFGGILGTSTSHMSQSSSYGNLHSHDRLSYPPHSVSPTDINTSLPPMSSFHRGSTSSSPYVAASHTPPINGSDSILGTRGNAAGSSQTGDALGKALASIYSPDHTSSSFPSNPSTPVGSPSPLTGTSQWPRPGGQAPSSPSYENSLHSLQSRMEDRLDRLDDAIHVLRNHAVGPSTSLPAGHSDIHSLLGPSHNAPIGSLNSNYGGSSLVASSRSASMVGTHREDSVSLNGNHSVLSSTVTTSSTDLNHKTQENYRGGLQSQSGTVVTTEIKTENKEKDENLHEPPSSDDMKSDDESSQKDIKVSSRGRTSSTNEDEDLNPEQKIEREKERRMANNARERLRVRDINEAFKELGRMCQLHLKSEKPQTKLLILHQAVAVILSLEQQVRERNLNPKAACLKRREEEKVSAVSAEPPTTLPGTHPGLSETTNPMGHM

SEQ ID NO: 13051 - protein, 706 aa, Homo Sapiens
MNPQQQRMAAIGTDKELSDLLDFSAMFSPPVNSGKTRPTTLGSSQFSGSGIDERGGTTSWGTSGQPSPSYDSSRGFTDSPHYSDHLNDSRLGAHEGLSPTPFMNSNLMGKTSERGSFSLYSRDTGLPGCQSSLLRQDLGLGSPAQLSSSGKPGTAYYSFSATSSRRRPLHDSAALDPLQAKKVRKVPPGLPSSVYAPSPNSDDFNRESPSYPSPKPPTSMFASTFFMQDGTHNSSDLWSSSNGMSQPGFGGILGTSTSHMSQSSSYGNLHSHDRLSYPPHSVSPTDINTSLPPMSSFHRGSTSSSPYVAASHTPPINGSDSILGTRGNAAGSSQTGDALGKALASIYSPDHTSSSFPSNPSTPVGSPSPLTGTSQWPRPGGQAPSSPSYENSLHSLKNRVEQQLHEHLQDAMSFLKDVCEQSRMEDRLDRLDDAIHVLRNHAVGPSTSLPAGHSDIHSLLGPSHNAPIGSLNSNYGGSSLVASSRSASMVGTHREDSVSLNGNHSVLSSTVTTSSTDLNHKTQENYRGGLQSQSGTVVTTEIKTENKEKDENLHEPPSSDDMKSDDESSQKDIKVSSRGRTSSTNEDEDLNPEQKIEREKERRMANNARERLRVRDINEAFKELGRMCQLHLKSEKPQTKLLILHQAVAVILSLEQQVRERNLNPKAACLKRREEEKVSAVSAEPPTTLPGTHPGLSETTNPMGHM

SEQ ID NO: 13052 - protein, 706 aa, Homo Sapiens; identical to SEQ ID NO: 13051

SEQ ID NO: 13053 - protein, 682 aa, Homo Sapiens; identical to SEQ ID NO: 13050

SEQ ID NO: 13054 - protein, 666 aa, Homo Sapiens
MNPQQQRMAAIGTDKELSDLLDFSAMFSPPVNSGKTRPTTLGSSQFSGSGTIHEMKQLNSKARQKGQRIKGFTDSPHYSDHLNDSRLGAHEGLSPTPFMNSNLMGKTSERGSFSLYSRDTGLPGCQSSLLRQDLGLGSPAQLSSSGKPGTAYYSFSATSSRRRPLHDSAALDPLQAKKVRKVPPGLPSSVYAPSPNSDDFNRESPSYPSPKPPTSMFASTFFMQDGTHNSSDLWSSSNGMSQPGFGGILGTSTSHMSQSSSYGNLHSHDRLSYPPHSVSPTDINTSLPPMSSFHRGSTSSSPYVAASHTPPINGSDSILGTRGNAAGSSQTGDALGKALASIYSPDHTSSSFPSNPSTPVGSPSPLTGTSQWPRPGGQAPSSPSYENSLHSLKNRVEQQLHEHLQDAMSFLKDVCEQSRMEDRLDRLDDAIHVLRNHAVGPSTSLPAGHSDIHSLLGPSHNAPIGSLNSNYGGSSLVASSRSASMVGTHREDSVSLNGNHSVLSSTVTTSSTDLNHKTQENYRGGLQSQSGTVVTTEIKTENKEKDENLHEPPSSDDMKSDDESSQKDIKVSSRGRTSSTNEDEDLNPEQKIEREKERRMANNARERLRVRDINEAFKELGRMCQLHLKSEKPQTKLLILHQAVAVILSLEQQVRERNLNPKAACL

SEQ ID NO: 13055 - protein, 339 aa, Homo Sapiens
MSSNSSTSQWPRPGGQAPSSPSYENSLHSLKNRVEQQLHEHLQDAMSFLKDVCEQSRMEDRLDRLDDAIHVLRNHAVGPSTSLPAGHSDIHSLLGPSHNAPIGSLNSNYGGSSLVASSRSASMVGTHREDSVSLNGNHSVLSSTVTTSSTDLNHKTQENYRGGLQSQSGTVVTTEIKTENKEKDENLHEPPSSDDMKSDDESSQKDIKVSSRGRTSTNEDEDLNPEQKIEREKERRMANNARERLRVRDINEAFKELGRMCQLHLKSEKPQTKLLILHQAVAVILSLEQQVRERNLNPKAACLKRREEEKVSAVSAEPPTTLPGTHPGLSETTNPMGHM

SEQ ID NO: 13056 - protein, 316 aa, Homo Sapiens
MSSNSSTSQWPRPGGQAPSSPSYENSLHSLQSRMEDRLDRLDDAIHVLRNHAVGPSTSLPAGHSDIHSLLGPSHNAPIGSLNSNYGGSSLVASSRSASMVGTHREDSVSLNGNHSVLSSTVTTSSTDLNHKTQENYRGGLQSQSGTVVTTEIKTENKEKDENLHEPPSSDDMKSDDESSQKDIKVSSRGRTSSTNEDEDLNPEQKIEREKERRMANNARERLRVRDINEAFKELGRMCQLHLKSEKPQTKLLILHQAVAVILSLEQQVRERNLNPKAACLKRREEEKVSAVSAEPPTTLPGTHPGLSETTNPMGHM

SEQ ID NO: 13057 - protein, 536 aa, Homo Sapiens
MYCAYPVPGMGSNSLMYYYNGKTVYAPSPNSDDFNRESPSYPSPKPPTSMFASTFFMQDGTHNSSDLWSSSNGMSQPGFGGILGTSTSHMSQSSSYGNLHSHDRLSYPPHSVSPTDINTSLPPMSSFHRGSTSSSPYVAASHTPPINGSDSILGTRGNAAGSSQTGDALGKALASIYSPDHTSSSFPSNPSTPVGSPSPLTGTSQWPRPGGQAPSSPSYENSLHSLKNRVEQQLHEHLQDAMSFLKDVCEQSRMEDRLDRLDDAIHVLRNHAVGPSTSLPAGHSDIHSLLGPSHNAPIGSLNSNYGGSSLVASSRSASMVGTHREDSVSLNGNHSVLSSTVTTSSTDLNHKTQENYRGGLQSQSGTVVTTEIKTENKEKDENLHEPPSSDDMKSDDESSQKDIKVSSRGRTSSTNEDEDLNPEQKIEREKERRMANNARERLRVRDINEAFKELGRMCQLHLKSEKPQTKLLILHQAVAVILSLEQQVRERNLNPKAACLKRREEEKVSAVSAEPPTTLPGTHPGLSETTNPMGHM

SEQ ID NO: 13058 - protein, 512 aa, Homo Sapiens
MYCAYPVPGMGSNSLMYYYNGKTVYAPSPNSDDFNRESPSYPSPKPPTSMFASTFFMQDGTHNSSDLWSSSNGMSQPGFGGILGTSTSHMSQSSSYGNLHSHDRLSYPPHSVSPTDINTSLPPMSSFHRGSTSSSPYVAASHTPPINGSDSILGTRGNAAGSSQTGDALGKALASIYSPDHTSSSFPSNPSTPVGSPSPLTGTSQWPRPGGQAPSSPSYENSLHSLQSRMEDRLDRLDDAIHVLRNHAVGPSTSLPAGHSDIHSLLGPSHNAPIGSLNSNYGGSSLVASSRSASMVGTHREDSVSLNGNHSVLSSTVTTSSTDLNHKTQENYRGGLQSQSGTVVTTEIKTENKEKDENLHEPPSSDDMKSDDESSQKDIKVSSRGRTSSTNEDEDLNPEQKIEREKERRMANNARERLRVRDINEAFKELGRMCQLHLKSEKPQTKLLILHQAVAVILSLEQQVRERNLNPKAACLKRREEEKVSAVSAEPPTTLPGTHPGLSETTNPMGHM

SEQ ID NO: 13059 - protein, 48 aa, Homo Sapiens
  misc_feature (1)..(1): Xaa can be any naturally occurring amino acid
XERNLNPKAACLKRREEEKVSAVSAEPPTTLPGTHPGLSETTNPMGHM

SEQ ID NO: 13060 - protein, 44 aa, Homo Sapiens
  misc_feature (1)..(1): Xaa can be any naturally occurring amino acid
XNPKAACLKRREEEKVSAVSAEPPTTLPGTHPGLSETTNPMGHM

SEQ ID NO: 13061 - protein, 433 aa, Homo Sapiens
MRQSHQLPLVGLLLFSFIPSQLCEICEVSEENYIRLKPLLNTMIQSNYNRGTSAVNVVLSLKLVGIQIQTLMQKMIQQIKYNVKSRLSDVSSGELALIILALGVCRNAEENLIYDYHLIDKLENKFQAEIENMEAHNGTPLTNYYQLSLDVLALCLFNGNYSTAEVVNHFTPENKNYYFGSQFSVDTGAMAVLALTCVKKSLINGQIKADEGSLKNISIYTKSLVEKILSEKKENGLIGNTFSTGEAMQALFVSSDYYNENDWNCQQTLNTVLTEISQGAFSNPNAAAQVLPALMGKTFLDINKDSSCVSASGNFNISADEPITVTPPDSQSYISVNYSVRINETYFTNVTVLNGSVFLSVMEKAQKMNDTIFGFTMEERSWGPYITCIQGLCANNNDRTYWELLSGGEPLSQGAGSYVVRNGENLEVRWSKY

SEQ ID NO: 13062 - protein, 402 aa, Homo Sapiens
MDSHLVEKLGQHLLPWMDRLSLEHLNPSIYVGLRLSSLQAGTKEDLYLHSLKLGYQQCLLGSAFSEDDGDCQGKPSMGQLALYLLALRANCEFVRGHKGDRLVSQLKWFLEDEKRAIGHDHKGHPHTSYYQYGLGILALCLHQKRVHDSVVDKLLYAVEPFHQGHHSVDTAAMAGLAFTCLKRSNFNPGRRQRITMAIRTVREEILKAQTPEGHFGNVYSTPLALQFLMTSPMRGAELGTACLKARVALLASLQDGAFQNALMISQLLPVLNHKTYIDLIFPDCLAPRVMLEPAAETIPQTQEIISVTLQVLSLLPPYRQSISVLAGSTVEDVLKKAHELGGFTYETQASLSGPYLTSVMGKAAGEREFWQLLRDPNTPLLQGIADYRPKDGETIELRLVSW

SEQ ID NO: 13063 - protein, 423 aa, Homo Sapiens
MRHLGAFLFLLGVLGALTEMCEIPEMDSHLVEKLGQHLLPWMDRLSLEHLNPSIYVGLRLSSLQAGTKEDLYLHSLKLGYQQCLLGEDDGDCQGKPSMGQLALYLLALRANCEFVRGHKGDRLVSQLKWFLEDEKRAIGHDHKGHPHTSYYQYGLGILALCLHQKRVHDSVVDKLLYAVEPFHQGHHSVDTAAMAGLAFTCLKRSNFNPGRRQRITMAIRTVREEILKAQTPEGHFGNVYSTPLALQFLMTSPMRGAELGTACLKARVALLASLQDGAFQNALMISQLLPVLNHKTYIDLIFPDCLAPRVMLEPAAETIPQTQEIISVTLQVLSLLPPYRQSISVLAGSTVEDVLKKAHELGGFTYETQASLSGPYLTSVMGKAAGEREFWQLLRDPNTPLLQGIADYRPKDGETIELRLVSW

SEQ ID NO: 13064 - protein, 427 aa, Homo Sapiens
MRHLGAFLFLLGVLGALTEMCEIPEMDSHLVEKLGQHLLPWMDRLSLEHLNPSIYVGLRLSSLQAGTKEDLYLHSLKLGYQQCLLGSAFSEDDGDCQGKPSMGQLALYLLALRANCEFVRGHKGDRLVSQLKWFLEDEKRAIGHDHKGHPHTSYYQYGLGILALCLHQKRVHDSVVDKLLYAVEPFHQGHHSVDTAAMAGLAFTCLKRSNFNPGRRQRITMAIRTVREEILKAQTPEGHFGNVYSTPLALQFLMTSPMRGAELGTACLKARVALLASLQDGAFQNALMISQLLPVLNHKTYIDLIFPDCLAPRVMLEPAAETIPQTQEIISVTLQVLSLLPPYRQSISVLAGSTVEDVLKKAHELGGFTYETQASLSGPYLTSVMGKAAGEREFWQLLRDPNTPLLQGIADYRPKDGETIELRLVSW

SEQ ID NO: 13065 - protein, 400 aa, Homo Sapiens
MRHLGAFLFLLGVLGALTEMCEIPEMDSHLVEKLGQHLLPWMDRLSLEHLNPSIYVGLRLSSLQAGTKEDLYLHSLKLGYQQCLLGSAFSEDDGDCQGKPSMGQLALYLLALRANWHDHKGHPHTSYYQYGLGILALCLHQKRVHDSVVDKLLYAVEPFHQGHHSVDTAAMAGLAFTCLKRSNFNPGRRQRITMAIRTVREEILKAQTPEGHFGNVYSTPLALQFLMTSPMRGAELGTACLKARVALLASLQDGAFQNALMISQLLPVLNHKTYIDLIFPDCLAPRVMLEPAAETIPQTQEIISVTLQVLSLLPPYRQSISVLAGSTVEDVLKKAHELGGFTYETQASLSGPYLTSVMGKAAGEREFWQLLRDPNTPLLQGIADYRPKDGETIELRLVSW

SEQ ID NO: 13066 - protein, 94 aa, Homo Sapiens
DTDVLQPTLVNAGHFSLCVNVVLETDWSSPVSARSTEGEEPAVGPGLPRLRGPFWKFPGPGHAGLGAHPLHHPVIQQEGFLPAPRGFGYRSEVD

SEQ ID NO: 13067 - protein, 483 aa, Homo Sapiens [sequence omitted]

SEQ ID NO: 13068 - protein, 73 aa, Homo Sapiens
MKGRFLFPLRLLLWMCLHLQRQASELHQPSMPGCPLTSSSRLFDNAQMHQFLNIHVKFENCTFGEIKFYIQLA

SEQ ID NO: 13069 - protein, 88 aa, Homo Sapiens
MRPRGLPPLLVVLLGCWASVSAQTDATPAVTTEGLNSTEAALATFGTFPSTRPPGTPRAPGPSSGPRPTPVTDGATASFVVKKQSSIH

SEQ ID NO: 13070 - protein, 88 aa, Homo Sapiens; identical to SEQ ID NO: 13069

SEQ ID NO: 13071 - protein, 75 aa, Homo Sapiens
MRPRGLPPLLVVLLGCWASVSAQTDATPAVTTEGLNSTEAALATFGTFPSTRPPGTPRAPGPSSGPRPTPVTDGG

SEQ ID NO: 13072 - protein, 100 aa, Homo Sapiens
MRPRGLPPLLVVLLGCWASVSAQTDATPAVTTEGLNSTEAALATFGTFPSTRPPGTPRAPGPSSGPRPTPVTDGGYHVPAPGVHSDPTSRGQPRCCSLCL

SEQ ID NO: 13073 - protein, 100 aa, Homo Sapiens; identical to SEQ ID NO: 13072

SEQ ID NO: 13074 - protein, 100 aa, Homo Sapiens; identical to SEQ ID NO: 13072

SEQ ID NO: 13075 - protein, 106 aa, Homo Sapiens
MRPRGLPPLLVVLLGCWASVSAQTDATPAVTTEGLNSTEAALATFGTFPSTRPPGTPRAPGPSSGPRPTPVTDGHATCRYRSRRLTVSGELDGKLQVASGSVGGEE

SEQ ID NO: 13076 - protein, 83 aa, Homo Sapiens
MRPRGLPPLLVVLLGCWASVSAQTDATPAVTTEGLNSTEAALATFGTFPSTRPPGTPRAPGPSSGPRPTPVTDGSHSVTQAGV

SEQ ID NO: 13077 - protein, 162 aa, Homo Sapiens
MRPRGLPPLLVVLLGCWASVSAQTDATPAVTTEGLNSTEAALATFGTFPSTRPPGTPRAPGPSSGPRPTPVTDVAVLCVCDLSPAQCDINCCCDPDCSSVDFSVFSACSVPVVTGDSQFCSQKAVIYSLNFTANPPQRVFELVDQINPSIFCIHITNCRCSV

SEQ ID NO: 13078 - protein, 179 aa, Homo Sapiens
MRPRGLPPLLVVLLGCWASVSAQTDATPAVTTEGLNSTEAALATFGTFPSTRPPGTPRAPGPSSGPRPTPVTDVAVLCVCDLSPAQCDINCCCDPDCSSVDFSVFSACSVPVVTGDSQFCSQKAVIYSLNFTANPPQRVFELVDQINPSIFCIHITNSHFTPGLSRWLCESRSRILSFP

SEQ ID NO: 13079 - protein, 245 aa, Homo Sapiens
MRPRGLPPLLVVLLGCWASVSAQTDATPAVTTEGLNSTEAALATFGTFPSTRPPGTPRAPGPSSGPRPTPVTDVAVLCVCDLSPAQCDINCCCDPDCSSVDFSVFSACSVPVVTGDSQFCSQKAVIYSLNFTANPPQRVFELVDQINPSIFCIHITNYKPALSFINPEVPDENNFDTLMKTSDGFTLNAESYVSFTTKLDIPTAAKYEVSLNLIDSFHPITNIFPCKLIFKVTRKTGFLETELIL

SEQ ID NO: 13080 - protein, 592 aa, Homo Sapiens
MRPRGLPPLLVVLLGCWASVSAQTDATPAVTTEGLNSTEAALATFGTFPSTRPPGTPRAPGPSSGPRPTPVTDVAVLCVCDLSPAQCDINCCCDPDCSSVDFSVFSACSVPVVTGDSQFCSQKAVIYSLNFTANPPQRVFELVDQINPSIFCIHITNYKPALSFINPEVPDENNFDTLMKTSDGFTLNAESYVSFTTKLDIPTAAKYEYGVPLQTSDSFLRFPSSLTSSLCTDNNPAAFLVNQAVKCTRKINLEQCEEIEALSMAFYSSPEILRVPDSRKKVPITVQSIVIQSLNKTLTRREDTDVLQPTLVNAGHFSLCVNVVLEVKYSLTYTDAGEVTKADLSFVLGTVSSVVVPLQQKFEIHFLQENTQPVPLSGNPGYVVGLPLAAGFQPHKGSGIIQTTNRYGQLTILHSTTEQDCLALEGVRTPVLFGYTMQSGCKLRLTGALPCQLVAQKVKSLLWGQGFPDYVAPFGNSQAQDMLDWVPIHFITQSFNRKHFVLQDSCQLPGALVIEVKWTKYGSLLNPQAKIVNVTANLISSSFPEANSGNERTILISTAVTFVDVSAPAEAGFRAPPAINARLPFNFFFPFV

SEQ ID NO: 13081 - protein, 587 aa, Homo Sapiens
MRPRGLPPLLVVLLGCWASVSAQTDATPAVTTEGLNSTEAALATFGTFPSTRPPGTPRAPGPSSGPRPTPVTDVAVLCVCDLSPAQCDINCCCDPDCSSVDFSVFSACSVPVVTGDSQFCSQKAVIYSLNFTANPPQRVFELVDQINPSIFCIHITNYKPALSFINPEVPDENNFDTLMKTSDGFTLNAESYVSFTTKLDIPTAAKYEYGVPLQTSDSFLRFPSSLTSSLCTDNNPAAFLVNQAVKCTRKINLEQCEEIEALSMAFYSSPEILRVPDSRKKVPITVQSIVIQSLNKTLTRREDTDVLQPTLVNAGHFSLCVNVVLEVKYSLTYTDAGEVTKADLSFVLGTVSSVVVPLQQKFEIHFLQENTQPVPLSGNPGYVVGLPLAAGFQPHKGSGIIQTTNRYGQLTILHSTTEQDCLALEGVRTPVLFGYTMQSGCKLRLTGALPCQLVAQKVKSLLWGQGFPDYVAPFGNSQAQDMLDWVPIHFITQSFNRKDSCQLPGALVIEVKWTKYGSLLNPQAKIVNVTANLISSSFPEANSGNERTILISTAVTFVDVSAPAEAGFRAPPAINARLPFNFFFPFV

SEQ ID NO: 13082 - protein, 573 aa, Homo Sapiens
MRPRGLPPLLVVLLGCWASVSAQTDATPAVTTEGLNSTEAALATFGTFPSTRPPGTPRAPGPSSGPRPTPVTDVAVLCVCDLSPAQCDINCCCDPDCSSVDFSVFSACSVPVVTGDSQFCSQKAVIYSLNFTANPPQRVFELVDQINPSIFCIHITNYKPALSFINPEVPDENNFDTLMKTSDGFTLNAESYVSFTTKLDIPTAAKYEYGVPLQTSDSFLRFPSSLTSSLCTDNNPAGQAYWFTPVIPALWEAEARGSLEVPDSRKKVPITVQSIVIQSLNKTLTRREDTDVLQPTLVNAGHFSLCVNVVLEVKYSLTYTDAGEVTKADLSFVLGTVSSVVVPLQQKFEIHFLQENTQPVPLSGNPGYVVGLPLAAGFQPHKGSGIIQTTNRYGQLTILHSTTEQDCLALEGVRTPVLFGYTMQSGCKLRLTGALPCQLVAQKVKSLLWGQGFPDYVAPFGNSQAQDMLDWVPIHFITQSFNRKDSCQLPGALVIEVKWTKYGSLLNPQAKIVNVTANLISSSFPEANSGNERTILISTAVTFVDVSAPAEAGFRAPPAINARLPFNFFFPFV

SEQ ID NO: 13083 - protein, 263 aa, Homo Sapiens
MRPRGLPPLLVVLLGCWASVSAQTDATPAVTTEGLNSTEAALATFGTFPSTRPPGTPRAPGPSSGPRPTPVTDVAVLCVCDLSPAQCDINCCCDPDCSSVDFSVFSACSVPVVTGDSQFCSQKAVIYSLNFTANPPQRVFELVDQINPSIFCIHITNYKPALSFINPEVPDENNFDTLMKTSDGFTLNAESYVSFTTKLDIPTAAKYEYGVPLQTSDSFLRFPSSLTSSLCTDNNPAGQAYWFTPVIPALWEAEARGSLERFW

SEQ ID NO: 13084 - protein, 573 aa, Homo Sapiens [sequence omitted]

SEQ ID NO: 13085 - protein, 625 aa, Homo Sapiens
MRLETAEAYVGPGGPECPMRTPQLALLQVFFLVFPDGVRPQPSSSPSGAVPTSLELQRGTDGGTLQSPSEATATRPAVPGLPTVVPTLVTPSAPGNRTVDLFPVLPICVCDLTPGACDINCCCDRDCYLLHPRTVFSFCLPGSVRSSSWVCVDNSVIFRSNSPFPSRVFMDSNGIRQFCVHVNNSNLNYFQKLQKVNATNFQALAAEFGGESFTSTFQTQSPPSFYRAGDPILTYFPKWSVISLLRQPAGVGAGGLCAESNPAGFLESKSTTCTRFFKNLASSCTLDSALNAASYYNFTVLKVPRSMTDPQNMEFQVPVILTSQANAPLLAGNTCQNVVSQVTYEIETNGTFGIQKVSVSLGQTNLTVEPGASLQQHFILRFRAFQQSTAASLTSPRSGNPGYIVGKPLLALTDDISYSMTLLQSQGNGSCSVKRHEVQFGVNAISGCKLRLKKADCSHLQQEIYQTLHGRPRPEYVAIFGNADPAQKGGWTRILNRHCSISAINCTSCCLIPVSLEIQVLWAYVGLLSNPQAHVSGVRFLYQCQSIQDSQQVTEVSLTTLVNFVDITQKPQPPRGQPKMDWKWPFDFFPFKVAFSRGVFSQKCSVSPILILCLLLLGVLNLETM

SEQ ID NO: 13086 - protein, 459 aa, Homo Sapiens
MRTPQLALLQVFFLVFPDGVRPQPSSSPSGAVPTSLELQRGTDGGTLQSPSEATATRPAVPGLPTVVPTLVTPSAPGNRTVDLFPVLPICVCDLTPGACDINCCCDRDCYLLHPRTVFSFCLPGSVRSSSWVCVDNSVIFRSNSPFPSRVFMDSNGIRQFCVHVNNCFLESKSTTCTRFFKNLASSCTLDSALNAASYYNFTVLKVPRSMTDPQNMEAFQQSTAASLTSPRSGNPGYIVGKPLLALTDDISYSMTLLQSQGNGSCSVKRHEVQFGVNAISGCKLRLKKADCSHLQQEIYQTLHGRPRPEYVAIFGNADPAQKGGWTRILNRHCSISAINCTSCCLIPVSLEIQVLWAYVGLLSNPQAHVSGVRFLYQCQSIQDSQQVTEVSLTTLVNFVDITQKPQPPRGQPKMDWKWPFDFFPFKVAFSRGVFSQKCSVSPILILCLLLLGVLNLETM

SEQ ID NO: 13087 - protein, 443 aa, Homo Sapiens
MRTPQLALLQVFFLVFPDGVRPQPSSSPSGAVPTSLELQRGTDGGTLQSPSEATATRPAVPGLPTVVPTLVTPSAPGNRTVDLFPVLPICVCDLTPGACDINCCCDRDCYLLHPRTVFSFCLPGSVRSSSWVCVDNSVIFRSNSPFPSRVFMDSNGIRQFCVHVNNSNLNYFQKLQKVNATNFQALAAEFGGESFTSTFQTQSPPSFYRAGDPILTYFPKWSVISLLRQPAGVGAGGLCAESNPAGFLESKSTTCTRFFKNLASSCTLDSALNAASYYNFTVLKVPRSMTDPQNMEFQVPVILTSQANAPLLAGNTCQNVVSQVTYEIETNGTFGIQKVSVSLGQTNLTVEPGASLQQHFILRFRAFQQSTAASLTSPRSGNPGYIVGKPLLALTDDISYSVSFLELGGLLQPNEKSCKGFQTYVRLAKGEEFFVHYNEVLIY

SEQ ID NO: 13088 - protein, 607 aa, Homo Sapiens
MRTPQLALLQVFFLVFPDGVRPQPSSSPSGAVPTSLELQRGTDGGTLQSPSEATATRPAVPGLPTVVPTLVTPSAPGNRTVDLFPVLPICVCDLTPGACDINCCCDRDCYLLHPRTVFSFCLPGSVRSSSWVCVDNSVIFRSNSPFPSRVFMDSNGIRQFCVHVNNSNLNYFQKLQKVNATNFQALAAEFGGESFTSTFQTQSPPSFYRAGDPILTYFPKWSVISLLRQPAGVGAGGLCAESNPAGFLESKSTTCTRFFKNLASSCTLDSALNAASYYNFTVLKVPRSMTDPQNMEFQVPVILTSQANAPLLAGNTCQNVVSQVTYEIETNGTFGIQKVSVSLGQTNLTVEPGASLQQHFILRFRAFQQSTAASLTSPRSGNPGYIVGKPLLALTDDISYSMTLLQSQGNGSCSVKRHEVQFGVNAISGCKLRLKKADCSHLQQEIYQTLHGRPRPEYVAIFGNADPAQKGGWTRILNRHCSISAINCTSCCLIPVSLEIQVLWAYVGLLSNPQAHVSGVRFLYQCQSIQDSQQVTEVSLTTLVNFVDITQKPQPPRGQPKMDWKWPFDFFPFKVAFSRGVFSQKCSVSPILILCLLLLGVLNLETM

SEQ ID NO: 13089 - protein, 607 aa, Homo Sapiens; identical to SEQ ID NO: 13088

SEQ ID NO: 13090 - protein, 304 aa, Homo Sapiens
MATWKSPCFLYCLFILGPRLTGQNNSVDLTNEETTDSTTSKISPSEDTQQENGSMFSLITWNIDGLDLNNLSERARGVCSYLALYSPDVIFLQEVIPPYYSYLKKRSSNYEIITGHEEGYFTAIMLKKSRVKLKSQEIIPFPSTKMMRNLLCVHVNVSGNELCLMTSHLESTRGHAAERMNQLKMVLKKMQEAPESATVIFAGDTNLRDREVTRCGGLPNNIVDVWEFLGKPKHCQYTWDTQMNSNLGITAACKLRFDRIFFRAAAEEGHIIPRSLDLLGLEKLDCGRFPSDHWGLLCNLDIIL

SEQ ID NO: 13091 - protein, 362 aa, Homo Sapiens
MELGSCLEGGREAAEEEGEPEVKKRRLLCVEFASVASCDAAVAQCFLAENDWEMERALNSYFEPPVEESALERRPETISEPKTYVDLTNEETTDSTTSKISPSEDTQQENGSMFSLITWNIDGLDLNNLSERARGVCSYLALYSPDVIFLQEVIPPYYSYLKKRSSNYEIITGHEEGYFTAIMLKKSRVKLKSQEIIPFPSTKMMRNLLCVHVNVSGNELCLMTSHLESTRGHAAERMNQLKMVLKKMQEAPESATVIFAGDTNLRDREVTRCGGLPNNIVDVWEFLGKPKHCQYTWDTQMNSNLGITAACKLRFDRIFFRAAAEEGHIIPRSLDLLGLEKLDCGRFPSDHWGLLCNLDIIL

SEQ ID NO: 13092 - protein, 426 aa, Homo Sapiens
MGRRRQRVDPAAGARAGALPEAIAALSRSLPSGPSPEIFRRAKFDRPEATSALWQLLFRVLSPLPAGNALASLALEVQARLVKSALCSQGYPRLALAQLPEDGSQGSRELLLALSWLLARGPVPEQMLAQARVPLGDEMTVCQCEALASPGPPAPHMEAEGPVDVRHVQWLMGKLRFRWRQLVSSQQEQCALLSKIHLYTRGCHSDQSLSHLSVTEAEMLRDPEGGQQLLRTLERENQRLEAVLAWRRSELVFWRWMDTVLGTCAPEVPAAASQPTFLPWVPERGGGELDLVVRELQALEEELREAAERRRAAWEAKAGGCGRGPEWSAARRASREAVEKELGALQQCWERDGGPAQPHGPHRLVRREDGAAGDRDLRAAVVIRTLRSQEACLEAVLRRLQGQCRQELARLVGARPGLIWIPPPGR

SEQ ID NO: 13093 - protein, 495 aa, Homo Sapiens
MGRRRQRVDPAAGARAGALPEAIAALSRSLPSGPSPEIFRRAKFDRPEATSALWQLLFRVLSPLPAGNALASLALEVQARLVKSALCSQGYPRLALAQLPEDGSQGSRELLLALSWLLARGPVPEQMLAQARVPLGDEMTVCQCEALASPGPPAPHMEAEGPVDVRHVQWLMGKLRFRWRQLVSSQQEQCALLSKIHLYTRGCHSDQSLSHLSVTEAEMLRDPEGGQQVSGAGAAQNLDLAYPKCLHSFCTPGMGPRTFWNDLWLVCEQPGLLPGDWAAPLDPGGASACSLLSPFRALLRTLERENQRLEAVLAWRRSELVFWRWMDTVLGTCAPEVPAAASQPTFLPWVPERGGGELDLVVRELQALEEELREAAERRRAAWEAKAGGCGRGPEWSAARRASREAVEKELGALQQCWERDGGPAQPHGPHRLVRREDGAAGDRDLRAAVVIRTLRSQEACLEAVLRRLQGQCRQELARLVGARPGLIWIPPPGR

SEQ ID NO: 13094 - protein, 393 aa, Homo Sapiens
MGRRRQRVDPAAGARAGALPEAIAALSRSLPSGPSPEIFRRAKFDRPEATSALWQLLFRVLSPLPAGNALASLALEVQARLVKSALCSQGYPRLALAQLPEDGSQGSRELLLALSWLLARGPVPEQMLAQARVPLGDEMTVCQCEALASPGPPAPHMEAEGPVDVRHVQWLMGKLRFRWRQLVSSQQEQCALLSKLLRTLERENQRLEAVLAWRRSELVFWRWMDTVLGTCAPEVPAAASQPTFLPWVPERGGGELDLVVRELQALEEELREAAERRRAAWEAKAGGCGRGPEWSAARRASREAVEKELGALQQCWERDGGPAQPHGPHRLVRREDGAAGDRDLRAAVVIRTLRSQEACLEAVLRRLQGQCRQELARLVGARPGLIWIPPPGR

SEQ ID NO: 13095 - protein, 119 aa, Homo Sapiens
MGRRRQRVDPAAGARAGALPEAIAALSRSLPSGPSPEIFRRAKFDRPEATSALWQLLFRVLSPLPAGNALATRGWHWHNYLRMARRAVGSCCWLCPGSWPEDLCPSRCWPRPECLWVTR

SEQ ID NO: 13096 - protein, 54 aa, Homo Sapiens
MLAQARVPLGDEMTVCQCEALASPGPPAPHMEAEGPVDVRHVQWLMGKLRFRWR

SEQ ID NO: 13097 - protein, 157 aa, Homo Sapiens
MLAQARVPLGDEMTVCQCEALASPGPPAPHMEAEGPVDVRHVQWLMGKLRFRWRQLVSSQQEQCALLSKIHLYTRGCHSDQSLSHLSVTEAEMLRDPEGGQQLLRTLERENQRLEAVLAWRRSELVFWRWMDTVLGTCAPEVPAAASQPTFLPWVPE

SEQ ID NO: 13098 - protein, 248 aa, Homo Sapiens
MLAQARVPLGDEMTVCQIHLYTRGCHSDQSLSHLSVTEAEMLRDPEGGQQLLRTLERENQRLEAVLAWRRSELVFWRWMDTVLGTCAPEVPAAASQPTFLPWVPERGGGELDLVVRELQALEEELREAAERRRAAWEAKAGGCGRGPEWSAARRASREAVEKELGALQQCWERDGGPAQPHGPHRLVRREDGAAGDRDLRAAVVIRTLRSQEACLEAVLRRLQGQCRQELARLVGARPGLIWIPPPGR

SEQ ID NO: 13099 - protein, 248 aa, Homo Sapiens; identical to SEQ ID NO: 13098

SEQ ID NO: 13100 - protein, 80 aa, Homo Sapiens
MSGQRGDWTSALWQLLFRVLSPLPAGNALASLALEVQARLVKSALCSQGYPRLALAQLPEDGSQGSRELLLALSWLLARG

SEQ ID NO: 13101 - protein, 110 aa, Homo Sapiens
MSGQRGDWTSALWQLLFRVLSPLPAGNALASLALEVQARLVKSALCSQGYPRLALAQLPEDGSQGSRELLLALSWLLARGPVPEQMLAQARVPLGDEMTVCQCEALASPG

SEQ ID NO: 13102 - protein, 216 aa, Homo Sapiens
MSGQRGDWTSALWQLLFRVLSPLPAGNALASLALEVQARLVKSALCSQGYPRLALAQLPEDGSQGSRELLLALSWLLARGPVPEQMLAQARVPLGDEMTVCQCEALASPGPPAPHMEAEGPVDVRHVQWLMGKLRFRWRQLVSSQQEQCALLSKIHLYTRGCHSDQSLSHLSVTEAEMLRDPEGGQQLLRTLERENQRLEAVLAWRRSELVFWRWM

SEQ ID NO: 13103 - protein, 303 aa, Homo Sapiens [sequence omitted]

SEQ ID NO: 13104 - protein, 352 aa, Homo Sapiens
MSGQRGDWTSALWQLLFRVLSPLPAGNALASLALEVQARLVKSALCSQGYPRLALAQLPEDGSQGSRELLLALSWLLARGPVPEQMLAQARVPLGDEMTVCQCEALASPGPPAPHMEAEGPVDVRHVQWLMGKLRFRWRQLVSSQQEQCALLSKLLRTLERENQRLEAVLAWRRSELVFWRWMDTVLGTCAPEVPAAASQPTFLPWVPERGGGELDLVVRELQALEEELREAAERRRAAWEAKAGGCGRGPEWSAARRASREAVEKELGALQQCWERDGGPAQPHGPHRLVRREDGAAGDRDLRAAVVIRTLRSQEACLEAVLRRLQGQCRQELARLVGARPGLIWIPPPGR

SEQ ID NO: 13105 - protein, 354 aa, Homo Sapiens
MSGQRGDWVQTSALWQLLFRVLSPLPAGNALASLALEVQARLVKSALCSQGYPRLALAQLPEDGSQGSRELLLALSWLLARGPVPEQMLAQARVPLGDEMTVCQCEALASPGPPAPHMEAEGPVDVRHVQWLMGKLRFRWRQLVSSQQEQCALLSKLLRTLERENQRLEAVLAWRRSELVFWRWMDTVLGTCAPEVPAAASQPTFLPWVPERGGGELDLVVRELQALEEELREAAERRRAAWEAKAGGCGRGPEWSAARRASREAVEKELGALQQCWERDGGPAQPHGPHRLVRREDGAAGDRDLRAAVVIRTLRSQEACLEAVLRRLQGQCRQELARLVGARPGLIWIPPPGR

SEQ ID NO: 13106 - protein, 976 aa, Homo Sapiens
MDSLASLVLCGVSLLLSASFLPATLTMTVDKGDNVNISFKKVLIKEEDAVIYKNGSFIHSVPRHEVPDILEVHLPHAQPQDAGVYSARYIGGNLFTSAFTRLIVRRCEAQKWGPECNHLCTACMNNGVCHEDTGECICPPGFMGRTCEKACELHTFGRTCKERCSGQEGCKSYVFCLPDPYGCSCATGWKGLQCNEGIQRMTPKIVDLPDHIEVNSGKFNPICKASGWPLPTNEEMTLVKPDGTVLHPKDFNHTDHFSVAIFTIHRILPPDSGVWVCSVNTVAGMVEKPFNISVKVLPKPLNAPNVIDTGHNFAVINISSEPYFGDGPIKSKKLLYKPVNHYEAWQHIQVTNEIVTLNYLEPRTEYELCVQLVRRGEGGEGHPGPVRRFTTASIGLPPPRGLNLLPKSQTTLNLTWQPIFPSSEDDFYVEVERRSVQKSDQQNIKVPGNLTSVLLNNLHPREQYVVRARVNTKAQGEWSEDLTAWTLSDILPPQPENIKISNITHSSAVISWTILDGYSISSITIRYKVQGKNEDQHVDVKIKNATITQYQLKGLEPETAYQVDIFAENNIGSSNPAFSHELVTLPESQAPADLGGGKMLLIAILGSAGMTCLTVLLAFLIILQLKRANVQRRMAQAFQNREEPAVQFNSGTLALNRKVKNNPDPTIYPVLDWNDIKFQDVIGEGNFGQVLKARIKKDGLRMDAAIKRMKEYASKDDHRDFAGELEVLCKLGHHPNIINLLGACEHRGYLYLAIEYAPHGNLLDFLRKSRVLETDPAFAIANSTASTLSSQQLLHFAADVARGMDYLSQKQFIHRDLAARNILVGENYVAKIADFGLSRGQEVYVKKTMGRLPVRWMAIESLNYSVYTTNSDVWSYGVLLWEIVSLGGTPYCGMTCAELYEKLPQGYRLEKPLNCDDEVYDLMRQCWREKPYERPSFAQILVSLNRMLEERKTYVNTTLYEKFTYAGIDCSAEEAA

SEQ ID NO: 13107 - protein, 1124 aa, Homo Sapiens
MDSLASLVLCGVSLLLSGTVEGAMDLILINSLPLVSDAETSLTCIASGWRPHEPITIGRDFEALMNQHQDPLEVTQDVTREWAKKVVWKREKASKINGAYFCEGRVRGEAIRIRTMKMRQQASFLPATLTMTVDKGDNVNISFKKVLIKEEDAVIYKNGSFIHSVPRHEVPDILEVHLPHAQPQDAGVYSARYIGGNLFTSAFTRLIVRRCEAQKWGPECNHLCTACMNNGVCHEDTGECICPPGFMGRTCEKACELHTFGRTCKERCSGQEGCKSYVFCLPDPYGCSCATGWKGLQCNEACHPGFYGPDCKLRCSCNNGEMCDRFQGCLCSPGWQGLQCEREGIQRMTPKIVDLPDHIEVNSGKFNPICKASGWPLPTNEEMTLVKPDGTVLHPKDFNHTDHFSVAIFTIHRILPPDSGVWVCSVNTVAGMVEKPFNISVKVLPKPLNAPNVIDTGHNFAVINISSEPYFGDGPIKSKKLLYKPVNHYEAWQHIQVTNEIVTLNYLEPRTEYELCVQLVRRGEGGEGHPGPVRRFTTASIGLPPPRGLNLLPKSQTTLNLTWQPIFPSSEDDFYVEVERRSVQKSDQQNIKVPGNLTSVLLNNLHPREQYVVRARVNTKAQGEWSEDLTAWTLSDILPPQPENIKISNITHSSAVISWTILDGYSISSITIRYKVQGKNEDQHVDVKIKNATITQYQLKGLEPETAYQVDIFAENNIGSSNPAFSHELVTLPESQAPADLGGGKMLLIAILGSAGMTCLTVLLAFLIILQLKRANVQRRMAQAFQNVREEPAVQFNSGTLALNRKVKNNPDPTIYPVLDWNDIKFQDVIGEGNFGQVLKARIKKDGLRMDAAIKRMKEYASKDDHRDFAGELEVLCKLGHHPNIINLLGACEHRGYLYLAIEYAPHGNLLDFLRKSRVLETDPAFAIANSTASTLSSQQLLHFAADVARGMDYLSQKQFIHRDLAARNILVGENYVAKIADFGLSRGQEVYVKKTMGRLPVRWMAIESLNYSVYTTNSDVWSYGVLLWEIVSLGGTPYCGMTCAELYEKLPQGYRLEKPLNCDDEVYDLMRQCWREKPYERPSFAQILVSLNRMLEERKTYVNTTLYEKFTYAGIDCSAEEAA

SEQ ID NO: 13108 - protein, 1081 aa, Homo Sapiens
MDSLASLVLCGVSLLLSGTVEGAMDLILINSLPLVSDAETSLTCIASGWRPHEPITIGRDFEALMNQHQDPLEVTQDVTREWAKKVVWKREKASKINGAYFCEGRVRGEAIRIRTMKMRQQASFLPATLTMTVDKGDNVNISFKKVLIKEEDAVIYKNGSFIHSVPRHEVPDILEVHLPHAQPQDAGVYSARYIGGNLFTSAFTRLIVRRCEAQKWGPECNHLCTACMNNGVCHEDTGECICPPGFMGRTCEKACELHTFGRTCKERCSGQEGCKSYVFCLPDPYGCSCATGWKGLQCNEGIQRMTPKIVDLPDHIEVNSGKFNPICKASGWPLPTNEEMTLVKPDGTVLHPKDFNHTDHFSVAIFTIHRILPPDSGVWVCSVNTVAGMVEKPFNISVKVLPKPLNAPNVIDTGHNFAVINISSEPYFGDGPIKSKKLLYKPVNHYEAWQHIQVTNEIVTLNYLEPRTEYELCVQLVRRGEGGEGHPGPVRRFTTASIGLPPPRGLNLLPKSQTTLNLTWQPIFPSSEDDFYVEVERRSVQKSDQQNIKVPGNLTSVLLNNLHPREQYVVRARVNTKAQGEWSEDLTAWTLSDILPPQPENIKISNITHSSAVISWTILDGYSISSITIRYKVQGKNEDQHVDVKIKNATITQYQLKGLEPETAYQVDIFAENNIGSSNPAFSHELVTLPESQAPADLGGGKMLLIAILGSAGMTCLTVLLAFLIILQLKRANVQRRMAQAFQNVREEPAVQFNSGTLALNRKVKNNPDPTIYPVLDWNDIKFQDVIGEGNFGQVLKARIKKDGLRMDAAIKRMKEYASKDDHRDFAGELEVLCKLGHHPNIINLLGACEHRGYLYLAIEYAPHGNLLDFLRKSRVLETDPAFAIANSTASTLSSQQLLHFAADVARGMDYLSQKQFIHRDLAARNILVGENYVAKIADFGLSRGQEVYVKKTMGRLPVRWMAIESLNYSVYTTNSDVWSYGVLLWEIVSLGGTPYCGMTCAELYEKLPQGYRLEKPLNCDDEVYDLMRQCWREKPYERPSFAQILVSLNRMLEERKTYVNTTLYEKFTYAGIDCSAEEAA

SEQ ID NO: 13109 - protein, 468 aa, Homo Sapiens
MDSLASLVLCGVSLLLSGTVEGAMDLILINSLPLVSDAETSLTCIASGWRPHEPITIGRDFEALMNQHQDPLEVTQDVTREWAKKVVWKREKASKINGAYFCEGRVRGEAIRIRTMKMRQQASFLPATLTMTVDKGDNVNISFKKVLIKEEDAVIYKNGSFIHSVPRHEVPDILEVHLPHAQPQDAGVYSARYIGGNLFTSAFTRLIVRRCEAQKWGPECNHLCTACMNNGVCHEDTGECICPPGFMGRTCEKACELHTFGRTCKERCSGQEGCKSYVFCLPDPYGCSCATGWKGLQCNEGIQRMTPKIVDLPDHIEVNSGKFNPICKASGWPLPTNEEMTLVKPDGTVLHPKDFNHTDHFSVAIFTIHRILPPDSGVWVCSVNTVAGMVEKPFNISVKVLPKPLNAPNVIDTGHNFAVINISSEPYFGDGPIKSKKLLYKPVNHYEAWQHIQVSMEKQRLTKANSDK

SEQ ID NO: 13110 - protein, 468 aa, Homo Sapiens
MDSLASLVLCGVSLLLSVPRHEVPDILEVHLPHAQPQDAGVYSARYIGGNLFTSAFTRLIVRRCEAQKWGPECNHLCTACMNNGVCHEDTGECICPPGFMGRTCEKACELHTFGRTCKERCSGQEGCKSYVFCLPDPYGCSCATGWKGLQCNEGIQRMTPKIVDLPDHIEVNSGKFNPICKASGWPLPTNEEMTLVKPDGTVLHPKDFNHTDHFSVAIFTIHRILPPDSGVWVCSVNTVAGMVEKPFNISVKVLPKPLNAPNVIDTGHNFAVINISSEPYFGDGPIKSKKLLYKPVNHYEAWQHIQVTNEIVTLNYLEPRTEYELCVQLVRRGEGGEGHPGPVRRFTTASIGLPPPRGLNLLPKSQTTLNLTWQPIFPSSEDDFYVEVERRSVQKSDQQNIKVPGNLTSVLLNNLHPREQYVVRARVNTKAQGEWSEDLTAWTLSDILPPQPENIKISNITHSSAVIS

SEQ ID NO: 13111 - protein, 298 aa, Homo Sapiens
MGIVCAQCSFILLLSIIRARPPPFLFCPLSSQRTESPYKPVHLGLGPTDKVAAIAMARIIDLVPWDDGSTHVYASPAILLPMERQRNQLAGVKQQLYHPALPTLRHMDRDTVKACLPDEHCQSTTYCRKDEFDNAHFTLLGVPNKPLQCLDITATGQKLRNRYHEGKLAPIAPGINRVDWPCFTRAIEDWSHFVSSAGEFKLPCLRKRAEGLSGYAVRYLKPDVTQTWRQEALCGAWAGRPCSPDSPRPYPCCPPQYCLSQNPSLDRYGQKPLPFDSLNTFRSFGSSYSRVNYLTPWH

SEQ ID NO: 13112 - protein, 271 aa, Homo Sapiens
MGIVCAQCSFILLLSIIRARPPPFLFCPLSSQRTESPYKPVHLGLGPTDKVAAIAMARIIDLVPWDDGSTHVYASPAILLPMERQRNQLAGVKQQLYHPALPTLRHMDRDTVKACLPDEHCQSTTYCRKDEFDNAHFTLLGVPNKPLQCLDITATGQKLRNRYHEGKLAPIAPGINRVDWPCFTRAIEDWSHFVSSAGEFKLPCLRKRAEGLSGYAVRYLKPDVTQTWRYCLSQNPSLDRYGQKPLPFDSLNTFRSFGSSYSRVNYLTPWH

SEQ ID NO: 13113 - protein, 267 aa, Homo Sapiens
MGARQIQTSSSQTSPEEAMGTPRIQHLLILLVLGASLLTSGLELYCQKGLSMTVEADPANMFNWTTEEVETCDKGALCQETILIIKAGTETAILATKGCIPEGEEAITIVQHSSPPGLIVTSYSNYCEDSFCNDKDSLSQFWEFSETTASTVSTTLHCPTCVALGTCFSAPSLPCPNGTTRCYQGKLEITGGGIESSVEVKGCTAMIGCRLMSGILAVGPMFVREACPHQLLTQPRKTENGATCLPIPVWGLQLLLPLLLPSFIHFS

SEQ ID NO: 13114 - protein, 249 aa, Homo Sapiens
MGTPRIQHLLILLVLGASLLTSGLELYCQKGLSMTVEADPANMFNWTTEEVETCDKGALCQETILIIKAGTETAILATKGCIPEGEEAITIVQHSSPPGLIVTSYSNYCEDSFCNDKDSLSQFWEFSETTASTVSTTLHCPTCVALGTCFSAPSLPCPNGTTRCYQGKLEITGGGIESSVEVKGCTAMIGCRLMSGILAVGPMFVREACPHQLLTQPRKTENGATCLPIPVWGLQLLLPLLLPSFIHFS

SEQ ID NO: 13115 - protein, 239 aa, Homo Sapiens
MSDLLLLGLIGGLTLLLLLTLLAFAGYSGLLAGVEVSAGSPPIRNVTVAYKFHMGLYGETGRLFTESCSISPKLRSIAVYYDNPHMERKLCAYPRLEIYQEDQIHFMCPLARQGDFYVPEMKETEWKWRGLVEAIDTQVDGTGADTMSDTSSVSLEVSPGSRETSAATLSPGASSRGWDDGDTRSEHSYSESGASGSSFEELDLEGEGPLGESRLDPGTEPLGTTKWLWEPTAPEKGKE

SEQ ID NO: 13116 - protein, 104 aa, Homo Sapiens
MSDLLLLGLIGGLTLLLLLTLLAFAGYSGLLAGVEVSAGSPPIRNVTVAYKFHMGLYGETGRLFTESCSISPKLRSIAVYYDNPHMVPPDKCRCAVGSILSEGE

SEQ ID NO: 13117 - protein, 140 aa, Homo Sapiens
MSDLLLLGLIGGLTLLLLLTLLAFAGYSGLLAGVEVSAGSPPIRNVTVAYKFHMGLYGETGRLFTESCSISPKLRSIAVYYDNPHMVPPDKCRCAVGSILSEGEESPSPELIDLYQKFGFKVFSFPAPSHVVTATFPYTT

SEQ ID NO: 13118 - protein, 151 aa, Homo Sapiens
MSDLLLLGLIGGLTLLLLLTLLAFAGYSGLLAGVEVSAGSPPIRNVTVAYKFHMGLYGETGRLFTESCSISPKLRSIAVYYDNPHMVPPDKCRCAVGSILSEGEESPSPELIDLYQKFGFKVFSFPAPSHVVTATFPYTTILSIWLATRRV

SEQ ID NO: 13119 - protein, 216 aa, Homo Sapiens
MSDLLLLGLIGGLTLLLLLTLLAFAGYSGLLAGVEVSAGSPPIRNVTVAYKFHMGLYGETGRLFTESCSISPKLRSIAVYYDNPHMVPPDKCRCAVGSILSEGEESPSPELIDLYQKFGFKVFSFPAPSHVVTATFPYTTILSIWLATRRVHPALDTYIKERKLCAYPRLEIYQEDQIHFMCPLARQGDFYVPEMKETEWKWRGLVEAIDTQVDGT

SEQ ID NO: 13120 - protein, 217 aa, Homo Sapiens
MSDLLLLGLIGGLTLLLLLTLLAFAGYSGLLAGVEVSAGSPPIRNVTVAYKFHMGLYGETGRLFTESCSISPKLRSIAVYYDNPHMVPPDKCRCAVGSILSEGEESPSPELIDLYQKFGFKVFSFPAPSHVVTATFPYTTILSIWLATRRVHPALDTYIKERKLCAYPRLEIYQEDQIHFMCPLARQGDFYVPEMKETEWKWRGLVEAIDTQVDGTG

SEQ ID NO: 13121 - protein, 313 aa, Homo Sapiens
MSDLLLLGLIGGLTLLLLLTLLAFAGYSGLLAGVEVSAGSPPIRNVTVAYKFHMGLYGETGRLFTESCSISPKLRSIAVYYDNPHMVPPDKCRCAVGSILSEGEESPSPELIDLYQKFGFKVFSFPAPSHVVTATFPYTTILSIWLATRRVHPALDTYIKERKLCAYPRLEIYQEDQIHFMCPLARQGDFYVPEMKETEWKWRGLVEAIDTQVDGTGADTMSDTSSVSLEVSPGSRETSAATLSPGASSRGWDDGDTRSEHSYSESGASGSSFEELDLEGEGPLGESRLDPGTEPLGTTKWLWEPTAPEKGKE

SEQ ID NO: 13122 - protein, 313 aa, Homo Sapiens; identical to SEQ ID NO: 13121

SEQ ID NO: 13123 - protein, 313 aa, Homo Sapiens; identical to SEQ ID NO: 13121

SEQ ID NO: 13124 - protein, 313 aa, Homo Sapiens; identical to SEQ ID NO: 13121

SEQ ID NO: 13125 - protein, 313 aa, Homo Sapiens; identical to SEQ ID NO: 13121

SEQ ID NO: 13126 - protein, 313 aa, Homo Sapiens; identical to SEQ ID NO: 13121

SEQ ID NO: 13127 - protein, 121 aa, Homo Sapiens
MSLHGILASAGTIGAVAAWLMSYKPALFGFLFLLLLLSNWLVKYEHKLTLPEPQQDEILQRLLFSEMKMKVLENQMFIIWNKMNHHGRSSRHRNFPMKKHRMRRHESICPTLSDCTSSSPS

SEQ ID NO: 13128 - protein, 121 aa, Homo Sapiens
RSLHGILASAGTIGAVAAWLMSYKPALFGFLFLLLLLSNWLVKYEHKLTLPEPQQDEILQRLLFSEMKMKVLENQMFIIWNKMNHHGRSSRHRNFPMKKHRMRRHESICPTLSDCTSSSPS

SEQ ID NO: 13129 - protein, 147 aa, Homo Sapiens
  misc_feature (1)..(1): Xaa can be any naturally occurring amino acid
XSAGTIGAVAAWLMSYKPALFGFLFLLLLLSNWLVKYEHKLTLPEPQQEEEKPKTSENDSKNSKAVNTKEVNRTHACFALQDEILQRLLFSEMKMKVLENQMFIIWNKMNHHGRSSRHRNFPMKKHRMRRHESICPTLSDCTSSSPS

SEQ ID NO: 13130 - protein, 76 aa, Homo Sapiens
MKSVIPSDGPSVACVKKASYLDCIRAIAANEADAVTLDAGLVYDAYLAPNNLKPVVAEFYGSKEDPQTFYYAVAVV

SEQ ID NO: 13131 - protein, 134 aa, Homo Sapiens
MNQLRGKKSCHTGLGRSAGWNIPIGLLYCDLPEPRKPLEKAVANFFSGSCAPCADGTDFPQLCQLCPGCGCSTLNQYFGYSGAFKCLKDGAGDVAFVKHSTIFENLANKADRDQYELLCLDNTRKPVDEYKDCH

SEQ ID NO: 13132 - protein, 102 aa, Homo Sapiens
MRLAVGALLVCAVLGLCLAVPDKTVRWCAVSEHEATKCQSFRDHMKSVIPSDGPFSYRRGPKYGRQGGLDLGASQPGPGTFWQRQIKRIPTIQLSSWEGPAV

SEQ ID NO: 13133 - protein, 120 aa, Homo Sapiens
MRLAVGALLVCAVLGLCLAVPDKTVRWCAVSEHEATKCQSFRDHMKSVIPSDGPSVACVKKASYLDCIRAIAANEADAVTLDAGLVYDAYLAPNNLKPVVAEFYGSKEDFLLCCCCGEEG

SEQ ID NO: 13134 - protein, 698 aa, Homo Sapiens
MRLAVGALLVCAVLGLCLAVPDKTVRWCAVSEHEATKCQSFRDHMKSVIPSDGPSVACVKKASYLDCIRAIAANEADAVTLDAGLVYDAYLAPNNLKPVVAEFYGSKEDPQTFYYAVAVVKKDSGFQMNQLRGKKSCHTGLGRSAGWNIPIGLLYCDLPEPRKPLEKAVANFFSGSCAPCADGTDFPQLCQLCPGCGCSTLNQYFGYSGAFKCLKDGAGDVAFVKHSTIFENLANKADRDQYELLCLDNTRKPVDEYKDCHLAQVPSHTVVARSMGGKEDLIWELLNQAQEHFGKDKSKEFQLFSSPHGKDLLFKDSAHGFLKVPPRMDAKMYLGYEYVTAIRNLREGTCPEAPTDECKPVKWCALSHHERLKCDEWSVNSVGKIECVSAETTEDCIAKIMNGEADAMSLDGGFVYIAGKCGLVPVLAENYNKSDNCEDTPEAGYFAIAVVKKSASDLTWDNLKGKKSCHTAVGRTAGWNIPMGLLYNKINHCRFDEFFSEGCAPGSKKDSSLCKLCMGSGLNLCEPNNKEGYYGYTGAFRCLVEKGDVAFVKHQTVPQNTGGKNPDPWAKNLNEKDYELLCLDGTRKPVEEYANCHLARAPNHAVVTRKDKEACVHKILRQQQHLFGSNVTDCSGNFCLFRSETKDLLFRDDTVCLAKLHDRNTYEKYLGEEYVKAVGNLRKCSTSSLLEACTFRRP

SEQ ID NO: 13135 - protein, 115 aa, Homo Sapiens
MRLAVGALLVCAVLGLCLAVPDKTVRWCAVSEHEATKCQSFRDHMKSVIPSDGPSVACVKKASYLDCIRAIAVSRCCLKESGRKPYFLCFQSLWNNSLLTGKRSGCCDTGCRFGV

SEQ ID NO: 13136 - protein, 143 aa, Homo Sapiens
  misc_feature (1)..(1): Xaa can be any naturally occurring amino acid
XYFAIAVVKKSASDLTWDNLKGKKSCHTAVGRTAGWNIPMGLLYNKINHCRFDEFFSEGCAPGSKKDSSLCKLCMGSGLNLCEPNNKEGYYGYTGAFRCLVEKGDVAFVKHQTVPQNTGETIQKRRGKGAEMGYRPVSHRKKP

SEQ ID NO: 13137 - protein, 214 aa, Homo Sapiens
MAFLRSMWGVLSALGRSGAELCTGCGSRLRSPFSFVYLPRWFSSVLASCPKKPVSSYLRFSKEQLPIFKAQNPDAKTTELIRRIAQRWRELPDSKKKIYQDAYRAEWQVYKEEISRFKEQLTPSQIMSLEKEIMDKHLKRKAMTKKKEKLKTVKENWKNLSDSEKELYIQHAKEDETRYHNEMKSWEEQMIEVGRKDLLRRTIKKQRKYGAEEC

SEQ ID NO: 13138 - protein, 246 aa, Homo Sapiens
MAFLRSMWGVLSALGRSGAELCTGCGSRLRSPFSFVYLPRWFSSVLASCPKKPVSSYLRFSKEQLPIFKAQNPDAKTTELIRRIAQRWRELPDSKKKIYQDAYRAEWQVYKEEISRFKEQLTPSQIMSLEKEIMDKHLKRKAMTKKKELTLLGKPKRPRSAYNVYVAERFQEAKGDSPQEKLKTVKENWKNLSDSEKELYIQHAKEDETRYHNEMKSWEEQMIEVGRKDLLRRTIKKQRKYGAEEC

SEQ ID NO: 13139 - protein, 219 aa, Homo Sapiens
  misc_feature (1)..(1): Xaa can be any naturally occurring amino acid
XELCTGCGSRLRSPFSFVYLPRWFSSVLASCPKKPVSSYLRFSKEQLPIFKAQNPDAKTTELIRRIAQRWRELPDSKKKIYQDAYRAEWQVYKEEISRFKEQLTPSQIMSLEKEIMDKHLKRKAMTKKKELTLLGKPKRPRSAYNVYVAERFQEAKGDSPQEKLKTVKENWKNLSDSEKEVSITVVSLKCLLRISVRECIRARLDSCEDNLVLLIIQVF

SEQ ID NO: 13140 - protein, 84 aa, Homo Sapiens
MATMENKVICALVLVSMLALGTLAEAQTETCTVAPRERQNCGFPGVTPSQCANKGCCFDDTVRGVPWCFYPNTIDVPPEEECEF

SEQ ID NO: 13141 - protein, 129 aa, Homo Sapiens
MGRRDAQLLAALLVLGLCALAGSEKPSPCQCSRLSPHNRTNCGFPGITSDQCFDNGCCFDSSVTGVPWCFHPLPKQESDQCVMEVSDRRNCGYPGISPEECASRKCCFSNFIFEVPWCFFPKSVEDCHY

SEQ ID NO: 13142 - protein, 94 aa, Homo Sapiens
MKRVLSCVPEPTVVMAARALCMLGLVLALLSSSSAEEYVGLSANQCAVPAKDRVDCGYPHVTPKECNNRGCCFDSRIPGVPWCFKPLQEAECTF

SEQ ID NO: 13143 - protein, 74 aa, Homo Sapiens [sequence omitted]

SEQ ID NO: 13144 - protein, 125 aa, Homo Sapiens
  misc_feature (1)..(1): Xaa can be any naturally occurring amino acid
XALLSSSSAEEYVGLSQQGLWQLTGLCLGQLQTSVPCQPRTGWTAATPMSPPRSATTGAAALTPGSLECLGVSSPCRKQNAPSEAPPAAPGRGMRGSEHPCPAVIAARHCSSQLFCPFAPGKRFC

SEQ ID NO: 13145 - protein, 61 aa, Homo Sapiens
MIYTMKKVHALWASVCLLLNLAPAPLNADSEEDEEHTIITDTELPPLKLMHSFCAFKADDG

SEQ ID NO: 13146 - protein, 76 aa, Homo Sapiens
MIYTMKKVHALWASVCLLLNLAPAPLNADSEEDEEHTIITDTELPPLKLMHSFCAFKADDGPCKAIMKRFFFNIFT

SEQ ID NO: 13147 - protein, 105 aa, Homo Sapiens
MIYTMKKVHALWASVCLLLNLAPAPLNADSEEDEEHTIITDTELPPLKLMHSFCAFKADDGPCKAIMKRFFFNIFTRQCEEFIYGGCEGNQNRFESLEECKKMCT

SEQ ID NO: 13148 - protein, 106 aa, Homo Sapiens
MIYTMKKVHALWASVCLLLNLAPAPLNADSEEDEEHTIITDTELPPLKLMHSFCAFKADDGPCKAIMKRFFFNIFTRQCEEFIYGGCEGNQNRFESLEECKKMCTR

SEQ ID NO: 13149 - protein, 106 aa, Homo Sapiens; identical to SEQ ID NO: 13148

SEQ ID NO: 13150 - protein, 304 aa, Homo Sapiens
MIYTMKKVHALWASVCLLLNLAPAPLNADSEEDEEHTIITDTELPPLKLMHSFCAFKADDGPCKAIMKRFFFNIFTRQCEEFIYGGCEGNQNRFESLEECKKMCTRDNANRIIKTTLQQEKPDFCFLEEDPGICRGYITRYFYNNQTKQCERFKYGGCLGNMNNFETLEECKNICEDGPNGFQVDNYGTQLNAVNNSLTPQSTKVPSLFEFHGPSWCLTPADRGLCRANENRFYYNSVIGKCRPFKYSGCGGNENNFTSKQECLRACKKGFIQRISKGGLIKTKRKRKKQRVKIAYEEIFVKNM

SEQ ID NO: 13151 - protein, 304 aa, Homo Sapiens; identical to SEQ ID NO: 13150

SEQ ID NO: 13152 - protein, 251 aa, Homo Sapiens
MIYTMKKVHALWASVCLLLNLAPAPLNADSEEDEEHTIITDTELPPLKLMHSFCAFKADDGPCKAIMKRFFFNIFTRQCEEFIYGGCEGNQNRFESLEECKKMCTRDNANRIIKTTLQQEKPDFCFLEEDPGICRGYITRYFYNNQTKQCERFKYGGCLGNMNNFETLEECKNICEDGPNGFQVDNYGTQLNAVNNSLTPQSTKVPSLFVTKEGTNDGWKNAAHIYQVFLNAFCIHASMFFLGLDSISCLC

SEQ ID NO: 13153 - protein, 251 aa, Homo Sapiens; identical to SEQ ID NO: 13152

SEQ ID NO: 13154 - protein, 215 aa, Homo Sapiens
MIYTMKKVHALWASVCLLLNLAPAPLNADSEEDEEHTIITDTELPPLKLMHSFCAFKADDGPCKAIMKRFFFNIFTRQCEEFIYGGCEGNQNRFESLEECKKMCTREKPDFCFLEEDPGICRGYITRYFYNNQTKQCERFKYGGCLGNMNNFETLEECKNICEDGPNGFQVDNYGTQLNAVNNSLTPQSTKVPSLFEFHGPSWCLTPADRGLCRA

SEQ ID NO: 13155 - protein, 107 aa, Homo Sapiens
EACDDACWRIEKVPKVCRLQVSVDDQCEGSTEKYFFNLSSMTCEKFFSGGCHRNRIENRFPDEATCMGFCAPKKNTEPVMLSPILAVEGMTITLLAGRIANVHVQKL

SEQ ID NO: 13156 - protein, 235 aa, Homo Sapiens
MDPARPLGLSILLLFLTEAALGDAAQEPTGNNAEICLLPLDYGPCRALLLRYYYDRYTQSCRQFLYGGCEGNANNFYTWEACDDACWRIEKVPKVCRLQVSVDDQCEGSTEKYFFNLSSMTCEKFFSGGCHRNRIENRFPDEATCMGFCAPKKIPSFCYSPKDEGLCSANVTRYYFNPRYRTCDAFTYTGCGGNDNNFVSREDCKRACAKALKKKKKMPKLRFASRIRKIRKKQF

SEQ ID NO: 13157 - protein, 59 aa, Homo Sapiens
MALVLEIFTLLASICWVSANIFEYQVDAQPLRPCELQRETAFLKQADYVPQCAEDGSFQ

SEQ ID NO: 13158 - protein, 2768 aa, Homo Sapiens
MALVLEIFTLLASICWVSANIFEYQVDAQPLRPCELQRETAFLKQADYVPQCAEDGSFQTVQCQNDGRSCWCVGANGSEVLGSRQPGRPVACLSFCQLQKQQILLSGYINSTDTSYLPQCQDSGDYAPVQCDVQQVQCWCVDAEGMEVYGTRQLGRPKRCPRSCEIRNRRLLHGVGDKSPPQCSAEGEFMPVQCKFVNTTDMMIFDLVHSYNRFPDAFVTFSSFQRRFPEVSGYCHCADSQGRELAETGLELLLDEIYDTIFAGLDLPSTFTETTLYRILQRRFLAVQSVISGRFRCPTKCEVERFTATSFGHPYVPSCRRNGDYQAVQCQTEGPCWCVDAQGKEMHGTRQQGEPPSCAEGQSCASERQQALSRLYFGTSGYFSQHDLFSSPEKRWASPRVARFATSCPPTIKELFVDSGLLRPMVEGQSQQFSVSENLLKEAIRAIFPSRGLARLALQFTTNPKRLQQNLFGGKFLVNVGQFNLSGALGTRGTFNFSQFFQQLGLASFLNGGRQEDLAKPLSVGLDSNSSTGTPEAAKKDGTMNKPTVGSFGFEINLQENQNALKFLASLLELPEFLLFLQHAISVPEDVARDLGDVMETVLSSQTCEQTPERLFVPSCTTEGSYEDVQCFSGECWCVNSWGKELPGSRVRGGQPRCPTDCEKQRARMQSLMGSQPAGSTLFVPACTSEGHFLPVQCFNSECYCVDAEGQAIPGTRSAIGKPKKCPTPCQLQSEQAFLRTVQALLSNSSMLPTLSDTYIPQCSTDGQWRQVQCNGPPEQVFELYQRWEAQNKGQDLTPAKLLVKIMSYREAASGNFSLFIQSLYEAGQQDVFPVLSQYPSLQDVPLAALEGKRPQPRENILLEPYLFWQILNGQLSQYPGSYSDFSTPLAHFDLRNCWCVDEAGQELEGMRSEPSKLPTCPGSCEEAKLRVLQFIRETEEIVSASNSSRFPLGESFLVAKGIRLRNEDLGLPPLFPPREAFAEQFLRGSDYAIRLAAQSTLSFYQRRRFSPDDSAGASALLRSGPYMPQCDAFGSWEPVQCHAGTGHCWCVDEKGGFIPGSLTARSLQIPQCPTTCEKSRTSGLLSSWKQARSQENPSPKDLFVPACLETGEYARLQASGAGTWCVDPASGEELRPGSSSSAQCPSLCNVLKSGVLSRRVSPGYVPACRAEDGGFSPVQCDQAQGSCWCVMDSGEEVPGTRVTGGQPACESPRCPLPFNASEVVGGTILCETISGPTGSAMQQCQLLCRQGSWSVFPPGPLICSLESGRWESQLPQPRACQRPQLWQTIQTQGHFQLQLPPGKMCSADYADLLQTFQVFILDELTARGFCQIQVKTFGTLVSIPVCNNSSVQVGCLTRERLGVNVTWKSRLEDIPVASLPDLHDIERALVGKDLLGRFTDLIQSGSFQLHLDSKTFPAETIRFLQGDHFGTSPRTWFGCSEGFYQVLTSEASQDGLGCVKCPEGSYSQDEECIPCPVGFYQEQAGSLACVPCPVGRTTISAGAFSQTHCVTDCQRNEAGLQCDQNGQYRASQKDRGSGKAFCVDGEGRRLPWWETEAPLEDSQCLMMQKFEKVPESKVIFDANAPVAVRSKVPDSEFPVMQCLTDCTEDEACSFFTVSTTEPEISCDFYAWTSDNVACMTSDQKRDALGNSKATSFGSLRCQVKVRSHGQDSPAVYLKKGQGSTTTLQKRFEPTGFQNMLSGLYNPIVFSASGANLTDAHLFCLLACDRDLCCDGFVLTQVQGGAIICGLLSSPSVLLCNVKDWMDPSEAWANATCPGVTYDQESHQVILRLGDQEFIKSLTPLEGTQDTFTNFQQVYLWKDSDMGSRPESMGCRKDTVPRPASPTEAGLTTELFSPVDLNQVIVNGNQSLSSQKHWLFKHLFSAQQANLWCLSRCVQEHSFCQLAEITESASLYFTCTLYPEAQVCDDIMESNAQGCRLILPQMPKALFRKKVILEDKVKNFYTRLPFQKLMGISIRNKVPMSEKSISNGFFECERRCDADPCCTGFGFLNVSQLKGGEVTCLTLNSLGIQMCSEENGGAWRILDCGSPDIEVHTYPFGWYQKPIAQNNAPSFCPLVVLPSLTEKVSLDSWQSLALSSVVVDPSIRHFDVAHVSTAATSNFSAVRDLCLSECSQHEACLITTLQTQPGAVRCMFYADTQSCTHSLQGQNCRLLLREEATHIYRKPGISLLSYEASVPSVPISTHGRLLGRSQAIQVGTSWKQVDQFLGVPYAAPPLAERRFQAPEPLNWTGSWDASKPRASCWQPGTRTSTSPGVSEDCLYLNVFIPQNVAPNASVLVFFHNTMDREESEGWPAIDGSFLAAVGNLIVVTASYRVGVFGFLSSGSGEVSGNWGLLDQVAALTWVQTHIRGFGGDPRRVSLAADRGGADVASIHLLTARATNSQLFRRAVLMGGSALSPAAVISHERAQQQAIALAKEVSCPMSSSQEVVSCLRQKPANVLNDAQTKLLAVSGPFHYWGPVIDGHFLREPPARALKRSLWVEVDLLIGSSQDDGLINRAKAVKQFEESRGRTSSKTAFYQALQNSLGGEDSDARVEAAATWYYSLEHSTDDYASFSRALENATRDYFIICPIIDMASAWAKRARGNVFMYHAPENYGHGSLELLADVQFALGLPFYPAYEGQFSLEEKSLSLKIMQYFSHFIRSGNPNYPYEFSRKVPTFATPWPDFVPRAGGENYKEFSELLPNRQGLKKADCSFWSKYISSLKTSADGAKGGQSAESEEEELTAGSGLREDLLSLQEPGSKTYSK

SEQ ID NO: 13159 - protein, 901 aa, Homo Sapiens
MLPGLTTELFSPVDLNQVIVNGNQSLSSQKHWLFKHLFSAQQANLWCLSRCVQEHSFCQLAEITESASLYFTCTLYPEAQVCDDIMESNAQGCRLILPQMPKALFRKKVILEDKVKNFYTRLPFQKLMGISIRNKVPMSEKSISNGFFECERRCDADPCCTGFGFLNVSQLKGGEVTCLTLNSLGIQMCSEENGGAWRILDCGSPDIEVHTYPFGWYQKPMSLDSWQSLALSSVVVDPSIRHFDVAHVSTAATSNFSAVRDLCLSECSQHEACLITTLQTQPGAVRCMFYADTQSCTHSLQGQNCRLLLREEATHIYRKPGISLLSYEASVPSVPISTHGRLLGRSQAIQVGTSWKQVDQFLGVPYAAPPLAERRFQAPEPLNWTGSWDASKPRASCWQPGTRTSTSPGVSEDCLYLNVFIPQNVAPNASVLVFFHNTMDREESEGWPAIDGSFLAAVGNLIVVTASYRVGVFGFLSSGSGEVSGNWGLLDQVAALTWVQTHIRGFGGDPRRVSLAADRGGADVASIHLLTARATNSQLFRRAVLMGGSALSPAAVISHERAQQQAIALAKEVSCPMSSSQEVVSCLRQKPANVLNDAQTKLLAVSGPFHYWGPVIDGHFLREPPARALKRSLWVEVDLLIGSSQDDGLINRAKAVKQFEESRGRTSSKTAFYQALQNSLGGEDSDARVEAAATWYYSLEHSTDDYASFSRALENATRDYFIICPIIDMASAWAKRARGNVFMYHAPENYGHGSLELLADVQFALGLPFYPAYEGQFSLEEKSLSLKIMQYFSHFIRSGNPNYPYEFSRKVPTFATPWPDFVPRAGGENYKEFSELLPNRQGLKKADCSFWSKYISSLKTSADGAKGGQSAESEEEELTAGSGLREDLLSLQEPGSKTYSK

SEQ ID NO: 13160 - protein, 172 aa, Homo Sapiens
SDARVEAAATWYYSLEHSTDDYASFSRALENATRDYFIICPIIDMASAWAKRARGNVFMYHAPENYGHGRNPNYPYEFSRKVPTFATPWPDFVPRAGGENYKEFSELLPNRQGLKKADCSFWSKYISSLKTSADGAKGGQSAESEEEELTAGSGLREDLLSLQEPGSKTYSK

SEQ ID NO: 13161 - protein, 74 aa, Homo Sapiens
  misc_feature (1)..(1): Xaa can be any naturally occurring amino acid
XGIQMCSEENGGAWRILDCGSPDIEVHTYPFGWYQKPIAQNNAPSFCPLVVLPSLTEKVFKVREVRGTQLKRME

SEQ ID NO: 13162 - protein, 226 aa, Homo Sapiens
  misc_feature (1)..(1): Xaa can be any naturally occurring amino acid
XGSWEPVQCHAGTGHCWCVDEKGGFIPGSLTARSLQIPQCPTTCEKSRTSGLLSSWKQARSQENPSPKDLFVPACLETGEYARLQASGAGTWCVDPASGEELRPGSSSSAQSCRAEDGGFSPVQCDQAQGSCWCVMDSGEEVPGTRVTGGQPACESPRCPLPFNASEVVGGTILCETISGPTGSAMQQCQLLCRQGSWSVFPPGPLICSLESGRWESQLPQPRACQ

SEQ ID NO: 13163 - protein, 194 aa, Homo Sapiens
  misc_feature (1)..(1): Xaa can be any naturally occurring amino acid
XHSECQWREHSLRPLPFLTPFSSLSQQESLCSAMRHLYLLCPFPPMAGCWAGPRPSRASCWQPGTRTSTSPGVSEDCLYLNVFIPQNVAPNASVLVFFHNTMDREESEGWPAIDGSFLAAVGNLIVVTASYRVGVFGFLSSGSGEVSGNWGLLDQVAALTWVQTHIRGFGGDPRRVSLAADRGGADVASIHLLT

SEQ ID NO: 13164 - protein, 1224 aa, Homo Sapiens
  misc_feature (1)..(1): Xaa can be any naturally occurring amino acid
XQEQAGSLACVPCPVGRTTISAGAFSQTHCVTDCQRNEAGLQCDQNGQYRASQKDRGSGKAFCVDGEGRRLPWWETEAPLEDSQCLMMQKFEKVPESKVIFDANAPVAVRSKVPDSEFPVMQCLTDCTEDEACSFFTVSTTEPEISCDFYAWTSDNVACMTSDQKRDALGNSKATSFGSLRCQVKVRSHGQDSPAVYLKKGAIICGLLSSPSVLLCNVKDWMDPSEAWANATCPGVTYDQESHQVILRLGDQEFIKSLTPLEGTQDTFTNFQQVYLWKDSDMGSRPESMGCRKDTVPRPASPTEAGLTTELFSPVDLNQVIVNGNQSLSSQKHWLFKHLFSAQQANLWCLSRCVQEHSFCQLAEITESASLYFTCTLYPEAQVCDDIMESNAQGCRLILPQMPKALFRKKVILEDKVKNFYTRLPFQKLMGISIRNKVPMSEKSISNGFFECERRCDADPCCTGFGFLNVSQLKGGEVTCLTLNSLGIQMCSEENGGAWRILDCGSPDIEVHTYPFGWYQKPIAQNNAPSFCPLVVLPSLTEKVSLDSWQSLALSSVVVDPSIRHFDVAHVSTAATSNFSAVRDLCLSECSQHEACLITTLQTQPGAVRCMFYADTQSCTHSLQGQNCRLLLREEATHIYRKPGISLLSYEASVPSVPISTHGRLLGRSQAIQVGTSWKQVDQFLGVPYAAPPLAERRFQAPEPLNWTGSWDASKPRASCWQPGTRTSTSPGVSEDCLYLNVFIPQNVAPNASVLVFFHNTMDREESEGWPAIDGSFLAAVGNLIVVTASYRVGVFGFLSSGSGEVSGNWGLLDQVAALTWVQTHIRGFGGDPRRVSLAADRGGADVASIHLLTARATNSQLFRRAVLMGGSALSPAAVISHERAQQQAIALAKEVSCPMSSSQEVVSCLRQKPANVLNDAQTKLLAVSGPFHYWGPVIDGHFLREPPARALKRSLWVEVDLLIGSSQDDGLINRAKAVKQFEESRGRTSSKTAFYQALQNSLGGEDSDARVEAAATWYYSLEHSTDDYASFSRALENATRDYFIICPIIDMASAWAKRARGNVFMYHAPENYGHGSLELLADVQFALGLPFYPAYEGQFSLEEKSLSLKIMQYFSHFIRSGNPNYPYEFSRKVPTFATPWPDFVPRAGGENYKEFSELLPNRQGLKKADCSFWSKYISSLKTSADGAKGGQSAESEEEELTAGSGLREDLLSLQEPGSKTYSK

SEQ ID NO: 13165 - protein, 147 aa, Homo Sapiens
  misc_feature (1)..(1): Xaa can be any naturally occurring amino acid
XSAGASALLRSGPYMPQCDAFGSWEPVQCHAGTGHCWCVDEKGGFIPGSLTARSLQIPQCPTTCEKSRTSGLLSSWKQARSQENPSPKDLFVPACLEARGVRCHSTRRRWLVEQSCVRQSRAPQALPCSSANCCAARAPGACFHQGH

SEQ ID NO: 13166 - protein, 62 aa, Homo Sapiens
  misc_feature (1)..(1): Xaa can be any naturally occurring amino acid
XSDMGSRPESMGCRKDTVPRPASPTEAGCVQEHSFCQLAEITESASLYFTCTLYPEAQVCDD

SEQ ID NO: 13167 - protein, 390 aa, Homo Sapiens
MPPSGLRLLPLLLPLLWLLVLTPGRPAAGLSTCKTIDMELVKRKRIEAIRGQILSKLRLASPPSQGEVPPGPLPEAVLALYNSTRDRVAGESAEPEPEPEADYYAKEVTRVLMVETHNEIYDKFKQSTHSIYMFFNTSELREAVPEPVLLSRAELRLLRLKLKVEQHVELYQKYSNNSWRYLSNRLLAPSDSPEWLSFDVTGVVRQWLSRGGEIEGFRLSAHCSCDSRDNTLQVDINGFTTGRRGDLATIHGMNRPFLLLMATPLERAQHLQSSRHRRALDTNYCFSSTEKNCCVRQLYIDFRKDLGWKWIHEPKGYHANFCLGPCPYIWSLDTQYSKVLALYNQHNPGASAAPCCVPQALEPLPIVYYVGRKPKVEQLSNMIVRSCKCS

SEQ ID NO: 13168 - protein, 120 aa, Homo Sapiens
  misc_feature (1)..(1): Xaa can be any naturally occurring amino acid
XFTTGRRGDLATIHGMNRPFLLLMATPLERAQHLQSSRHRRALDTNYCFSSTEKNCCVRQLYIDFRKDLGWKWIHEPKGYHANFCLGPCPYIWSLDTQYSKLNEQNLIQEVPNIWQREVG

SEQ ID NO: 13169 - protein, 414 aa, Homo Sapiens
MHYCVLSAFLILHLVTVALSLSTCSTLDMDQFMRKRIEAIRGQILSKLKLTSPPEDYPEPEEVPPEVISIYNSTRDLLQEKASRRAAACERERSDEEYYAKEVYKIDMPPFFPSENAIPPTFYRPYFRIVRFDVSAMEKNASNLVKAEFRVFRLQNPKARVPEQRIELYQILKSKDLTSPTQRYIDSKVVKTRAEGEWLSFDVTDAVHEWLHHKDRNLGFKISLHCPCCTFVPSNNYIIPNKSEELEARFAGIDGTSTYTSGDQKTIKSTRKKNSGKTPHLLLMLLPSYRLESQQTNRRKKRALDAAYCFRNVQDNCCLRPLYIDFKRDLGWKWIHEPKGYNANFCAGACPYLWSSDTQHSRVLSLYNTINPEASASPCCVSQDLEPLTILYYIGKTPKIEQLSNMIVKSCKCS

SEQ ID NO: 13170 - protein, 442 aa, Homo Sapiens
MHYCVLSAFLILHLVTVALSLSTCSTLDMDQFMRKRIEAIRGQILSKLKLTSPPEDYPEPEEVPPEVISIYNSTRDLLQEKASRRAAACERERSDEEYYAKEVYKIDMPPFFPSETVCPVVTTPSGSVGSLCSRQSQVLCGYLDAIPPTFYRPYFRIVRFDVSAMEKNASNLVKAEFRVFRLQNPKARVPEQRIELYQILKSKDLTSPTQRYIDSKVVKTRAEGEWLSFDVTDAVHEWLHHKDRNLGFKISLHCPCCTFVPSNNYIIPNKSEELEARFAGIDGTSTYTSGDQKTIKSTRKKNSGKTPHLLLMLLPSYRLESQQTNRRKKRALDAAYCFRNVQDNCCLRPLYIDFKRDLGWKWIHEPKGYNANFCAGACPYLWSSDTQHSRVLSLYNTINPEASASPCCVSQDLEPLTILYYIGKTPKIEQLSNMIVKSCKCS

SEQ ID NO: 13171 - protein, 412 aa, Homo Sapiens
MKMHLQRALVVLALLNFATVSLSLSTCTTLDFGHIKKKRVEAIRGQILSKLRLTSPPEPTVMTHVPYQVLALYNSTRELLEEMHGEREEGCTQENTESEYYAKEIHKFDMIQGLAEHNELAVCPKGITSKVFRFNVSSVEKNRTNLFRAEFRVLRVPNPSSKRNEQRIELFQILRPDEHIAKQRYIGGKNLPTRGTAEWLSFDVTDTVREWLLRRESNLGLEISIHCPCHTFQPNGDILENIHEVMEIKFKGVDNEDDHGRGDLGRLKKQKDHHNPHLILMMIPPHRLDNPGQGGQRKKRALDTNYCFRNLEENCCVRPLYIDFRQDLGWKWVHEPKGYYANFCSGPCPYLRSADTTHSTVLGLYNTLNPEASASPCCVPQDLEPLTILYYVGRTPKVEQLSNMVVKSCKCS

SEQ ID NO: 13172 - protein, 309 aa, Homo Sapiens
MKMHLQRALVVLALLNFATVSLSLSTCTTLDFGHIKKKRVEAIRGQILSKLRLTSPPEPTVMTHVPYQVLALYNSTRELLEEMHGEREEGCTQENTESEYYAKEIHKFDMIQGLAEHNELAVCPKGITSKVFRFNVSSVEKNRTNLFRAEFRVLRVPNPSSKRNEQRIELFQILRPDEHIAKQRYIGGKNLPTRGTAEWLSFDVTDTVREWLLRRESNLGLEISIHCPCHTFQPNGDILENIHEVMEIKFKGVDNEDDHGRGDLGRLKKQKDHHNPHLILMMIPPHRLDNPGQGGQRKKRALDTNYCFR

SEQ ID NO: 13173 - protein, 683 aa, Homo Sapiens
MALFVRLLALALALALGPAATLAGPAKSPYQLVLQHSRLRGRQHGPNVCAVQKVIGTNRKYFTNCKQWYQRKICGKSTVISYECCPGYEKVPGEKGCPAALPLSNLYETLGVVGSTTTQLYTDRTEKLRPEMEGPGSFTIFAPSNEAWASLPAEVLDSLVSNVNIELLNALRYHMVGRRVLTDELKHGMTLTSMYQNSNIQIHHYPNGIVTVNCARLLKADHHATNGVVHLIDKVISTITNNIQQIIEIEDTFETLRAAVAASGLNTMLEGNGQYTLLAPTNEAFEKIPSETLNRILGDPEALRDLLNNHILKSAMCAEAIVAGLSVETLEGTTLEVGCSGDMLTINGKAIISNKDILATNGVIHYIDELLIPDSAKTLFELAAESDVSTAIDLFRQAGLGNHLSGSERLTLLAPLNSVFKDGTPPIDAHTRNLLRNHIIKDQLASKYLYHGQTLETLGGKKLRVFVYRNSLCIENSCIAAHDKRGRYGTLFTMDRVLTPPMGTVMDVLKGDNRFSMLVAAIQSAGLTETLNREGVYTVFAPTNEAFRALPPRERSRLLGDAKELANILKYHIGDEILVSGGIGALVRLKSLQGDKLEVSLKNNVVSVNKEPVAEPDIMATNGVVHVITNVLQPPANRPQERGDELADSALEIFKQASAFSRASQRSVRLAPVYQKLLERMKH

SEQ ID NO: 13174 - protein, 65 aa, Homo Sapiens
MATNGVVHVITNVLQPPANRPQERGDELADSALEIFKQASAFSRASQRSVRLAPVYQKLLERMKH

SEQ ID NO: 13175 - protein, 219 aa, Homo Sapiens
RAAVAASGLNTMLEGNGQYTLLAPTNEAFEKIPSETLNRILGDPEALRDLLNNHILKSAMCAEAIVAGLSVETLEGTTLEVGCSGDMLTINGKAIISNKDILATNGVIHYIDELLIPDSAKTLFELAAESDVSTAIDLFRQAGLGNHLSGSERLTLLAPLNSVFKDGTPPIDAHTRNLLRNHIIKDQLASKYLYHGQTLETLGGKKLRVFVYRNVSSGS

SEQ ID NO: 13176 - protein, 366 aa, Homo Sapiens
  misc_feature (1)..(1): Xaa can be any naturally occurring amino acid
XAFEKIPSETLNRILGDPEALRDLLNNHILKSAMCAEAIVAGLSVETLEGTTLEVGCSGDMLTINGKAIISNKDILATNGVIHYIDELLIPDSAKTLFELAAESDVSTAIDLFRQAGLGNHLSGSERLTLLAPLNSVFKDGTPPIDAHTRNLLRNHIIKDQLASKYLYHGQTLETLGGKKLRVFVYRNSLCIENSCIAAHDKRGRYGTLFTMDRVLTPPMGTVMDVLKGDNRFSMLVAAIQSAGLTETLNREGVYTVFAPTNEAFRALPPRERSRLLGDAKELANILKYHIGDEILVSGGIGALVRLKSLQGDKLEVSLKNNVVSVNKEPVAEPDIMATNGVVHVITNVLQPPAPVYQKLLERMKH

SEQ ID NO: 13177 - protein, 59 aa, Homo Sapiens
  misc_feature (1)..(1): Xaa can be any naturally occurring amino acid
XKTLFELAAESDVSTAIDLFRQAGLGNHLSGSERLTLLAPLNSVFKGAHLSGPNHHPFL

SEQ ID NO: 13178 - protein, 194 aa, Homo Sapiens
  misc_feature (1)..(1): Xaa can be any naturally occurring amino acid
XNGVVHLIDKVISTITNNIQQIIEIEDTFETLRAAVAASGLNTMLEGNGQYTLLAPTNEAFEKIPSETLNRILGDPEALRDMLTINGKAIISNKDILATNGVIHYIDELLIPDSAKTLFELAAESDVSTAIDLFRQAGLGNHLSGSERLTLLAPLNSVFKDGTPPIDAHTRNLLRNHIIKDQLASKYLYHGQTL

SEQ ID NO: 13179 - protein, 128 aa, Homo Sapiens
  misc_feature (1)..(1): Xaa can be any naturally occurring amino acid
XPYQLVLQHSRLRGRQHGPNVCAVQKVIGTNRKYFTNCKQWYQRKICGKSTVISYECCPGYEKVPGEKGCPAALPLSNLYETLGVVGSTTTQLYTDRTEKLRPEMEGPGSFTIFAPSNEAWASLPAVR

SEQ ID NO: 13180 - protein, 78 aa, Homo Sapiens
  misc_feature (1)..(1): Xaa can be any naturally occurring amino acid
XQGDKLEVSLKNNVVSVNKEPVAEPDIMATNGVVHVITNVLQPPANRPQERGDELADSALEIFKQASAFSRPLSIKSY

SEQ ID NO: 13181 - protein, 114 aa, Homo Sapiens
MCIAEIDLIPRDRPFVCAPSSKTGSVTTTYCCNQDHCNKIELPTTGLPLLVQRTIARTIVLQESIGKGRFGEVWRGKWRGEEVAVKIFSSREERSWFREAEIYQTVMLRHENIL

SEQ ID NO: 13182 - protein, 114 aa, Homo Sapiens
MCIAEIDLIPRDRPFVCAPSSKTGSVTTTYCCNQDHCNKIELPTTGPFSVKSSPGLGPVELAAVIAGPVCFVCISLMLMVYICHNRTVIHHRVPNEEDPSLDRPFISEGTTLKD

SEQ ID NO: 13183 - protein, 126 aa, Homo Sapiens
MCIAEIDLIPRDRPFVCAPSSKTGSVTTTYCCNQDHCNKIELPTTGPFSVKSSPGLGPVELAAVIAGPVCFVCISLMLMVYICHNRTVIHHRVPNEEDPSLDRPFISEGTTLKDLIYDMTTSGSGS

SEQ ID NO: 13184 - protein, 118 aa, Homo Sapiens
MCIAEIDLIPRDRPFVCAPSSKTGSVTTTYCCNQDHCNKIELPTTVKSSPGLGPVELAAVIAGPVCFVCISLMLMVYICHNRTVIHHRVPNEEDPSLDRPFISEGTTLKDLIYDMTTS

SEQ ID NO: 13185 - protein, 122 aa, Homo Sapiens
MCIAEIDLIPRDRPFVCAPSSKTGSVTTTYCCNQDHCNKIELPTTVKSSPGLGPVELAAVIAGPVCFVCISLMLMVYICHNRTVIHHRVPNEEDPSLDRPFISEGTTLKDLIYDMTTSGSGS

SEQ ID NO: 13186 - protein, 434 aa, Homo Sapiens
MCIAEIDLIPRDRPFVCAPSSKTGSVTTTYCCNQDHCNKIELPTTVKSSPGLGPVELAAVIAGPVCFVCISLMLMVYICHNRTVIHHRVPNEEDPSLDRPFISEGTTLKDLIYDMTTSGSGSGLPLLVQRTIARTIVLQESIGKGRFGEVWRGKWRGEEVAVKIFSSREERSWFREAEIYQTVMLRHENILGFIAADNKDNGTWTQLWLVSDYHEHGSLFDYLNRYTVTVEGMIKLALSTASGLAHLHMEIVGTQGKPAIAHRDLKSKNILVKKNGTCCIADLGLAVRHDSATDTIDIAPNHRVGTKRYMAPEVLDDSINMKHFESFKRADIYAMGLVFWEIARRCSIGGIHEDYQLPYYDLVPSDPSVEEMRKVVCEQKLRPNIPNRWQSCEALRVMAKIMRECWYANGAARLTALRIKKTLSQLSQQEGIKM

SEQ ID NO: 13187 - protein, 426 aa, Homo Sapiens
MEAAVAAPRPRLLLLVLAAAAAAAAALLPGATALQCFCHLCTKDNFTCVTDGLCFVSVTETTDKVIHNSMCIAEIDLIPRDRPFVCAPSSKTGSVTTTYCCNQDHCNKIELPTTGLPLLVQRTIARTIVLQESIGKGRFGEVWRGKWRGEEVAVKIFSSREERSWFREAEIYQTVMLRHENILGFIAADNKDNGTWTQLWLVSDYHEHGSLFDYLNRYTVTVEGMIKLALSTASGLAHLHMEIVGTQGKPAIAHRDLKSKNILVKKNGTCCIADLGLAVRHDSATDTIDIAPNHRVGTKRYMAPEVLDDSINMKHFESFKRADIYAMGLVFWEIARRCSIGGIHEDYQLPYYDLVPSDPSVEEMRKVVCEQKLRPNIPNRWQSCEALRVMAKIMRECWYANGAARLTALRIKKTLSQLSQQEGIKM

SEQ ID NO: 13188 - protein, 383 aa, Homo Sapiens
MEAAVAAPRPRLLLLVLAAAAAAAAALLPGATALQCFCHLCTKDNFTCVTDGLCFVSVTETTDKVIHNSMCIAEIDLIPRDRPFVCAPSSKTGSVTTTYCCNQDHCNKIELPTTGPFSVKSSPGLGPVELAAVIAGPVCFVCISLMLMVYICHNRTVIHHRVPNEEDPSLDRPFISEGTTLKDLIYDMTTSGSGSGLPLLVQRTIARTIVLQESIGKGRFGEVWRGKWRGEEVAVKIFSSREERSWFREAEIYQTVMLRHENILGFIAADNKDNGTWTQLWLVSDYHEHGSLFDYLNRYTVTVEGMIKLALSTASGLAHLHMEIVGTQGKPAIAHRDLKSKNILVKKNGTCCIADLGLAVRHDSATDTIDIAPNHRVGTKRNS

SEQ ID NO: 13189 - protein, 507 aa, Homo Sapiens
MEAAVAAPRPRLLLLVLAAAAAAAAALLPGATALQCFCHLCTKDNFTCVTDGLCFVSVTETTDKVIHNSMCIAEIDLIPRDRPFVCAPSSKTGSVTTTYCCNQDHCNKIELPTTGPFSVKSSPGLGPVELAAVIAGPVCFVCISLMLMVYICHNRTVIHHRVPNEEDPSLDRPFISEGTTLKDLIYDMTTSGSGSGLPLLVQRTIARTIVLQESIGKGRFGEVWRGKWRGEEVAVKIFSSREERSWFREAEIYQTVMLRHENILGFIAADNKDNGTWTQLWLVSDYHEHGSLFDYLNRYTVTVEGMIKLALSTASGLAHLHMEIVGTQGKPAIAHRDLKSKNILVKKNGTCCIADLGLAVRHDSATDTIDIAPNHRVGTKRYMAPEVLDDSINMKHFESFKRADIYAMGLVFWEIARRCSIGGIHEDYQLPYYDLVPSDPSVEEMRKVVCEQKLRPNIPNRWQSCEALRVMAKIMRECWYANGAARLTALRIKKTLSQLSQQEGIKM

SEQ ID NO: 13190 - protein, 503 aa, Homo Sapiens
MEAAVAAPRPRLLLLVLAAAAAAAAALLPGATALQCFCHLCTKDNFTCVTDGLCFVSVTETTDKVIHNSMCIAEIDLIPRDRPFVCAPSSKTGSVTTTYCCNQDHCNKIELPTTVKSSPGLGPVELAAVIAGPVCFVCISLMLMVYICHNRTVIHHRVPNEEDPSLDRPFISEGTTLKDLIYDMTTSGSGSGLPLLVQRTIARTIVLQESIGKGRFGEVWRGKWRGEEVAVKIFSSREERSWFREAEIYQTVMLRHENILGFIAADNKDNGTWTQLWLVSDYHEHGSLFDYLNRYTVTVEGMIKLALSTASGLAHLHMEIVGTQGKPAIAHRDLKSKNILVKKNGTCCIADLGLAVRHDSATDTIDIAPNHRVGTKRYMAPEVLDDSINMKHFESFKRADIYAMGLVFWEIARRCSIGGIHEDYQLPYYDLVPSDPSVEEMRKVVCEQKLRPNIPNRWQSCEALRVMAKIMRECWYANGAARLTALRIKKTLSQLSQQEGIKM

SEQ ID NO: 13191 - protein, 35 aa, Homo Sapiens
MTSHYVIAIFALMSSCLATAGPEPGALCELSPVSA

SEQ ID NO: 13192 - protein, 89 aa, Homo Sapiens
MTSHYVIAIFALMSSCLATAGPEPGALCELSPVSASHPVQALMESFTVLSGCASRGTTGLPQEVHVLNLRTAGQGPGQLQREACSMNHY

SEQ ID NO: 13193 - protein, 851 aa, Homo Sapiens
MTSHYVIAIFALMSSCLATAGPEPGALCELSPVSASHPVQALMESFTVLSGCASRGTTGLPQEVHVLNLRTAGQGPGQLQREVTLHLNPISSVHIHHKSVVFLLNSPHPLVWHLKTERLATGVSRLFLVSEGSVVQFSSANFSLTAETEERNFPHGNEHLLNWARKEYGAVTSFTELKIARNIYIKVGEDQVFPPKCNIGKNFLSLNYLAEYLQPKAAEGCVMSSQPQNEEVHIIELITPNSNPYSAFQVDITIDIRPSQEDLEVVKNLILILKCKKSVNWVIKSFDVKGSLKIIAPNSIGFGKESERSMTMTKSIRDDIPSTQGNLVKWALDNGYSPITSYTMAPVANRFHLRLENNAEEMGDEEVHTIPPELRILLDPGALPALQNPPIRGGEGQNGGLPFPFPDISRRVWNEEGEDGLPRPKDPVIPSIQLFPGLREPEEVQGSVDIALSVKCDNEKMIVAVEKDSFQASGYSGMDVTLLDPTCKAKMNGTHFVLESPLNGCGTRPRWSALDGVVYYNSIVIQVPALGDSSGWPDGYEDLESGDNGFPGDMDEGDASLFTRPEIVVFNCSLQQVRNPSSFQEQPHGNITFNMELYNTDLFLVPSQGVFSVPENGHVYVEVSVTKAEQELGFAIQTCFISPYSNPDRMSHYTIIENICPKDESVKFYSPKRVHFPIPQADMDKKRFSFVFKPVFNTSLLFLQCELTLCTKMEKHPQKLPKCVPPDEACTSLDASIIWAMMQNKKTFTKPLAVIHHEAESKEKGPSMKEPNPISPPIFHGLDTLTVMGIAFAAFVIGALLTGALWYIYSHTGETAGRQQVPTSPPASENSSAAHSIGSTQSTPCSSSSTA

SEQ ID NO: 13194 - protein, 850 aa, Homo Sapiens
MTSHYVIAIFALMSSCLATAGPEPGALCELSPVSASHPVQALMESFTVLSGCASRGTTGLPQEVHVLNLRTAGQGPGQLQREVTLHLNPISSVHIHHKSVVFLLNSPHPLVWHLKTERLATGVSRLFLVSEGSVVQFSSANFSLTAETEERNFPHGNEHLLNWARKEYGAVTSFTELKIARNIYIKVGEDQVFPPKCNIGKNFLSLNYLAEYLQPKAAEGCVMSSQPQNEEVHIIELITPNSNPYSAFQVDITIDIRPSQEDLEVVKNLILILKCKKSVNWVIKSFDVKGSLKIIAPNSIGFGKESERSMTMTKSIRDDIPSTQGNLVKWALDNGYSPITSYTMAPVANRFHLRLENNEEMGDEEVHTIPPELRILLDPGALPALQNPPIRGGEGQNGGLPFPFPDISRRVWNEEGEDGLPRPKDPVIPSIQLFPGLREPEEVQGSVDIALSVKCDNEKMIVAVEKDSFQASGYSGMDVTLLDPTCKAKMNGTHFVLESPLNGCGTRPRWSALDGVVYYNSIVIQVPALGDSSGWPDGYEDLESGDNGFPGDMDEGDASLFTRPEIVVFNCSLQQVRNPSSFQEQPHGNITFNMELYNTDLFLVPSQGVFSVPENGHVYVEVSVTKAEQELGFAIQTCFISPYSNPDRMSHYTIIENICPKDESVKFYSPKRVHFPIPQADMDKKRFSFVFKPVFNTSLLFLQCELTLCTKMEKHPQKLPKCVPPDEACTSLDASIIWAMMQNKKTFTKPLAVIHHEAESKEKGPSMKEPNPISPPIFHGLDTLTVMGIAFAAFVIGALLTGALWYIYSHTGETAGRQQVPTSPPASENSSAAHSIGSTQSTPCSSSSTA

SEQ ID NO: 13195 - protein, 850 aa, Homo Sapiens; identical to SEQ ID NO: 13194

SEQ ID NO: 13196 - protein, 851 aa, Homo Sapiens; identical to SEQ ID NO: 13193

SEQ ID NO: 13197 - protein, 49 aa, Homo Sapiens
MTSHYVIAIFALMSSCLATAGWSAMARSWLTATSASRVQAILLPQPPEY

SEQ ID NO: 13198 - protein, 94 aa, Homo Sapiens
MGLAWGLGVLFLMHVCGTNRIPESGGDNSVFDIFELTGAARKGSGRRLVKGPDPSSPAFRIEDANLIPPVPDDKFQDLVDAVRAEKGFLLLASL

SEQ ID NO: 13199 - protein, 1170 aa, Homo Sapiens
MGLAWGLGVLFLMHVCGTNRIPESGGDNSVFDIFELTGAARKGSGRRLVKGPDPSSPAFRIEDANLIPPVPDDKFQDLVDAVRAEKGFLLLASLRQMKKTRGTLLALERKDHSGQVFSVVSNGKAGTLDLSLTVQGKQHVVSVEEALLATGQWKSITLFVQEDRAQLYIDCEKMENAELDVPIQSVFTRDLASIARLRIAKGGVNDNFQGVLQNVRFVFGTTPEDILRNKGCSSSTSVLLTLDNNVVNGSSPAIRTNYIGHKTKDLQAICGISCDELSSMVLELRGLRTIVTTLQDSIRKVTEENKELANELRRPPLCYHNGVQYRNNEEWTVDSCTECHCQNSVTICKKVSCPIMPCSNATVPDGECCPRCWPSDSADDGWSPWSEWTSCSTSCGNGIQQRGRSCDSLNNRCEGSSVQTRTCHIQECDKRFKQDGGWSHWSPWSSCSVTCGDGVITRIRLCNSPSPQMNGKPCEGEARETKACKKDACPINGGWGPWSPWDICSVTCGGGVQKRSRLCNNPTPQFGGKDCVGDVTENQICNKQDCPIDGCLSNPCFAGVKCTSYPDGSWKCGACPPGYSGNGIQCTDVDECKEVPDACFNHNGEHRCENTDPGYNCLPCPPRFTGSQPFGQGVEHATANKQVCKPRNPCTDGTHDCNKNAKCNYLGHYSDPMYRCECKPGYAGNGIICGEDTDLDGWPNENLVCVANATYHCKKDNCPNLPNSGQEDYDKDGIGDACDDDDDNDKIPDDRDNCPFHYNPAQYDYDRDDVGDRCDNCPYNHNPDQADTDNNGEGDACAADIDGDGILNERDNCQYVYNVDQRDTDMDGVGDQCDNCPLEHNPDQLDSDSDRIGDTCDNNQDIDEDGHQNNLDNCPYVPNANQADHDKDGKGDACDHDDDNDGIPDDKDNCRLVPNPDQKDSDGDGRGDACKDDFDHDSVPDIDDICPENVDISETDFRRFQMIPLDPKGTSQNDPNWVVRHQGKELVQTVNCDPGLAVGYDEFNAVDFSGTFFINTERDDDYAGFVFGYQSSSRFYVVMWKQVTQSYWDTNPTRAQGYSGLSVKVVNSTTGPGEHLRNALWHTGNTPGQVRTLWHDPRHIGWKDFTAYRWRLSHRPKTGFIRVVMYEGKKIMADSGPIYDKTYAGGRLGLFVFSQEMVFFSDLKYECRDP

SEQ ID NO: 13200 - protein, 83 aa, Homo Sapiens
MVWRLVLLALWVWPSTQAGHQDKDTTFDLFSISNINRKTIGAKQFRGPDPGVPAYRFVRFDYIPPVNADDLSKITKIMRQKEG

SEQ ID NO: 13201 - protein, 1172 aa, Homo Sapiens
MVWRLVLLALWVWPSTQAGHQDKDTTFDLFSISNINRKTIGAKQFRGPDPGVPAYRFVRFDYIPPVNADDLSKITKIMRQKEGFFLTAQLKQDGKSRGTLLALEGPGLSQRQFEIVSNGPADTLDLTYWIDGTRHVVSLEDVGLADSQWKNVTVQVAGETYSLHVGCDLIDSFALDEPFYEHLQAEKSRMYVAKGSARESHFRGLLQNVHLVFENSVEDILSKKGCQQGQGAEINAISENTETLRLGPHVTTEYVGPSSERRPEVCERSCEELGNMVQELSGLHVLVNQLSENLKRVSNDNQFLWELIGGPPKTRNMSACWQDGRFFAENETWVVDSCTTCTCKKFKTICHQITCPPATCASPSFVEGECCPSCLHSVDGEEGWSPWAEWTQCSVTCGSGTQQRGRSCDVTSNTCLGPSIQTRACSLSKCDTRIRQDGGWSHWSPWSSCSVTCGVGNITRIRLCNSPVPQMGGKNCKGSGRETKACQGAPCPIDGRWSPWSPWSACTVTCAGGIRERTRVCNSPEPQYGGKACVGDVQERQMCNKRSCPVDGCLSNPCFPGAQCSSFPDGSWSCGSCPVGFLGNGTHCEDLDECALVPDICFSTSKVPRCVNTQPGFHCLPCPPRYRGNQPVGVGLEAAKTEKQVCEPENPCKDKTHNCHKHAECIYLGHFSDPMYKCECQTGYAGDGLICGEDSDLDGWPNLNLVCATNATYHCIKDNCPHLPNSGQEDFDKDGIGDACDDDDDNDGVTDEKDNCQLLFNPRQADYDKDEVGDRCDNCPYVHNPAQIDTDNNGEGDACSVDIDGDDVFNERDNCPYVYNTDQRDTDGDGVGDHCDNCPLVHNPDQTDVDNDLVGDQCDNNEDIDDDGHQNNQDNCPYISNANQADHDRDGQGDACDPDDDNDGVPDDRDNCRLVFNPDQEDLDGDGRGDICKDDFDNDNIPDIDDVCPENNAISETDFRNFQMVPLDPKGTTQIDPNWVIRHQGKELVQTANSDPGIAVGFDEFGSVDFSGTFYVNTDRDDDYAGFVFGYQSSSRFYVVMWKQVTQTYWEDQPTRAYGYSGVSLKVVNSTTGTGEHLRNALWHTGNTPGQVRTLWHDPRNIGWKDYTAYRWHLTHRPKTGYIRVLVHEGKQVMADSGPIYDQTYAGGRLGLFVFSQEMVYFSDLKYECRDI

SEQ ID NO: 13202 - protein, 1172 aa, Homo Sapiens; identical to SEQ ID NO: 13201

SEQ ID NO: 13203 - protein, 485 aa, Homo Sapiens
MDNNKHCKQDNCLLTPNSGQEDADNDGVGDQCDDDADGDGIKNVEDNCRLFPNKDQQNSDTDSFGDACDNCPNVPNNDQKDTDGNGEGDACDNDVDGDGIPNGLDNCPKVPNPLQTDRDEDGVGDACDSCPEMSNPTQTDADSDLVGDVCDTNEDSDGDGHQDTKDNCPQLPNSSQLDSDNDGLGDECDGDDDNDGIPDYVPPGPDNCRLVPNPNQKDSDGNGVGDVCEDDFDNDAVVDPLDVCPESAEVTLTDFRAYQTVVLDPEGDAQIDPNWVVLNQGMEIVQTMNSDPGLAVGYTAFNGVDFEGTFHVNTVTDDDYAGFLFSYQDSGRFYVVMWKQTEQTYWQATPFRAVAQPGLQLKAVTSVSGPGEHLRNALWHTGHTPDQVRLLWTDPRNVGWRDKTSYRWQLLHRPQVGYIRVKLYEGPQLVADSGVIIDTSMRGGRLGVFCFSQENIIWSNLQYRCNDTVPEDFEPFRRQLLQGRV

SEQ ID NO: 13204 - protein, 947 aa, Homo Sapiens
METQELRGALALLLLCFFTSASQDLQVIDLLTVGESRQMVAVAEKIRTALLTAGDIYLLSTFRLPPKQGGVLFGLYSRQDNTRWLEASVVGKINKVLVRYQREDGKVHAVNLQQAGLADGRTHTVLLRLRGPSRPSPALHLYVDCKLGDQHAGLPALAPIPPAEVDGLEIRTGQKAYLRMQGFVESMKIILGGSMARVGALSECPFQGDESIHSAGEQTKALVTQLTLFNQILVELRDDIRDQVKEMSLIRNTIMECQVCGFHEQRSHCSPNPCFRGVDCMEVYEYPGYRCGPCPPGLQGNGTHCSDINECAHADPCFPGSSCINTMPGFHCEACPRGYKGTQVSGVGIDYARASKQVCNDIDECNDGNNGGCDPNSICTNTVGSFKCGPCRLGFLGNQSQGCLPARTCHSPAHSPCHIHAHCLFERNGAVSCQCNVGWAGNGNVCGTDTDIDGYPDQALPCMDNNKHCKQDNCLLTPNSGQEDADNDGVGDQCDDDADGDGIKNVEDNCRLFPNKDQQNSDTDSFGDACDNCPNVPNNDQKDTDGNGEGDACDNDVDGDGIPNGLDNCPKVPNPLQTDRDEDGVGDACDSCPEMSNPTQTDADSDLVGDVCDTNEDSDGDGHQDTKDNCPQLPNSSQLDSDNDGLGDECDGDDDNDGIPDYVPPGPDNCRLVPNPNQKDSDGNGVGDVCEDDFDNDAVVDPLDVCPESAEVTLTDFRAYQTVVLDPEGDAQIDPNWVVLNQGMEIVQTMNSDPGLAVGYTAFNGVDFEGTFHVNTVTDDDYAGFLFSYQDSGRFYVVMWKQTEQTYWQATPFRAVAQPGLQLKAVTSVSGPGEHLRNALWHTGHTPDQVRLLWTDPRNVGWRDKTSYRWQLLHRPQVGYIRVKLYEGPQLVADSGVIIDTSMRGGRLGVFCFSQENIIWSNLQYRCNDTVPEDFEPFRRQLLQGRV

SEQ ID NO: 13205 - protein, 956 aa, Homo Sapiens
METQELRGALALLLLCFFTSASQDLQVIDLLTVGESRQMVAVAEKIRTALLTAGDIYLLSTFRLPPKQGGVLFGLYSRQDNTRWLEASVVGKINKVLVRYQREDGKVHAVNLQQAGLADGRTHTVLLRLRGPSRPSPALHLYVDCKLGDQHAGLPALAPIPPAEVDGLEIRTGQKAYLRMQGFVESMKIILGGSMARVGALSECPFQGDESIHSAVTNALHSILGEQTKALVTQLTLFNQILVELRDDIRDQVKEMSLIRNTIMECQVCGFHEQRSHCSPNPCFRGVDCMEVYEYPGYRCGPCPPGLQGNGTHCSDINECAHADPCFPGSSCINTMPGFHCEACPRGYKGTQVSGVGIDYARASKQVCNDIDECNDGNNGGCDPNSICTNTVGSFKCGPCRLGFLGNQSQGCLPARTCHSPAHSPCHIHAHCLFERNGAVSCQCNVGWAGNGNVCGTDTDIDGYPDQALPCMDNNKHCKQDNCLLTPNSGQEDADNDGVGDQCDDDADGDGIKNVEDNCRLFPNKDQQNSDTDSFGDACDNCPNVPNNDQKDTDGNGEGDACDNDVDGDGIPNGLDNCPKVPNPLQTDRDEDGVGDACDSCPEMSNPTQTDADSDLVGDVCDTNEDSDGDGHQDTKDNCPQLPNSSQLDSDNDGLGDECDGDDDNDGIPDYVPPGPDNCRLVPNPNQKDSDGNGVGDVCEDDFDNDAVVDPLDVCPESAEVTLTDFRAYQTVVLDPEGDAQIDPNWVVLNQGMEIVQTMNSDPGLAVGYTAFNGVDFEGTFHVNTVTDDDYAGFLFSYQDSGRFYVVMWKQTEQTYWQATPFRAVAQPGLQLKAVTSVSGPGEHLRNALWHTGHTPDQVRLLWTDPRNVGWRDKTSYRWQLLHRPQVGYIRVKLYEGPQLVADSGVIIDTSMRGGRLGVFCFSQENIIWSNLQYRCNDTVPEDFEPFRRQLLQGRV

SEQ ID NO: 13206 - protein, 400 aa, Homo Sapiens
METQELRGALALLLLCFFTSASQDLQVIDLLTVGESRQMVAVAEKIRTALLTAGDIYLLSTFRLPPKQGGVLFGLYSRQDNTRWLEASVVGKINKVTNALHSILGEGNVPDPKHHYGVSGFHEQRSHCSPNPCFRGVDCMEVYEYPGYRCGPCPPGLQGNGTHCSDINECAHADPCFPGSSCINTMPGFHCEACPRGYKGTQVSGVGIDYARASKQVCNDIDECNDGNNGGCDPNSICTNTVGSFKCGPCRLGFLGNQSQGCLPARTCHSPAHSPCHIHAHCLFERNGAVSCQCNVGWAGNGNVCGTDTDIDGYPDQALPCMDNNKHCKQDNCLLTPNSGQEDADNDGVGDQCDDDADGDGIKNVEASPMDWTIALKSPTHYRQTGMRTGWEMLATAALK

SEQ ID NO: 13207 - protein, 836 aa, Homo Sapiens
METQELRGALALLLLCFFTSASQDLQVIDLLTVGESRQMVAVAEKIRTALLTAGDIYLLSTFRLPPKQGGVLFGLYSRQDNTRWLEASVVGKINKVTNALHSILGEQTKALVTQLTLFNQILVELRDDIRDQVKEMSLIRNTIMECQVCGFHEQRSHCSPNPCFRGVDCMEVYEYPGYRCGPCPPGLQGNGTHCSDINECAHADPCFPGSSCINTMPGFHCEACPRGYKGTQVSGVGIDYARASKQVCNDIDECNDGNNGGCDPNSICTNTVGSFKCGPCRLGFLGNQSQGCLPARTCHSPAHSPCHIHAHCLFERNGAVSCQCNVGWAGNGNVCGTDTDIDGYPDQALPCMDNNKHCKQDNCLLTPNSGQEDADNDGVGDQCDDDADGDGIKNVEDNCRLFPNKDQQNSDTDSFGDACDNCPNVPNNDQKDTDGNGEGDACDNDVDGDGIPNGLDNCPKVPNPLQTDRDEDGVGDACDSCPEMSNPTQTDADSDLVGDVCDTNEDSDGDGHQDTKDNCPQLPNSSQLDSDNDGLGDECDGDDDNDGIPDYVPPGPDNCRLVPNPNQKDSDGNGVGDVCEDDFDNDAVVDPLDVCPESAEVTLTDFRAYQTVVLDPEGDAQIDPNWVVLNQGMEIVQTMNSDPGLAVGYTAFNGVDFEGTFHVNTVTDDDYAGFLFSYQDSGRFYVVMWKQTEQTYWQATPFRAVAQPGLQLKAVTSVSGPGEHLRNALWHTGHTPDQVRLLWTDPRNVGWRDKTSYRWQLLHRPQVGYIRVKLYEGPQLVADSGVIIDTSMRGGRLGVFCFSQENIIWSNLQYRCNDTVPEDFEPFRRQLLQGRV

SEQ ID NO: 13208 - protein, 870 aa, Homo Sapiens
MGRLNKAILRYLKNDGKVHLVVFNNLQLADGRRHRILLRLSNLQRGAGSLELYLDCIQVDSVHNLPRAFAGPSQKPETIELRTFQRKPQDFLEELKLVVRGSLFQVASLQDCFLQQSEPLAATGTGDFNRQFLGQMTQLNQLLGEVKDLLRQQVKETSFLRNTIAECQACGPLKFQSPTPSTVVPPAPPAPPTRPPRRCDSNPCFRGVQCTDSRDGFQCGPCPEGYTGNGITCIDVDECKYHPCYPGVHCINLSPGFRCDACPVGFTGPMVQGVGISFAKSNKQVCTDIDECRNGACVPNSICVNTLGSYRCGPCKPGYTGDQIRGCKAERNCRNPELNPCSVNAQCIEERQGDVTCVCGVGWAGDGYICGKDVDIDSYPDEELPCSARNCKKDNCKYVPNSGQEDADRDGIGDACDEDADGDGILNEQDNCVLIHNVDQRNSDKDIFGDACDNCLSVLNNDQKDTDGDGRGDACDDDMDGDGIKNILDNCPKFPNRDQRDKDGDGVGDACDSCPDVSNPNQSDVDNDLVGDSCDTNQDSDGDGHQDSTDNCPTVINSAQLDTDKDGIGDECDDDDDNDGIPDLVPPGPDNCRLVPNPAQEDSNSDGVGDICESDFDQDQVIDRIDVCPENAEVTLTDFRAYQTVVLDPEGDAQIDPNWVVLNQGMEIVQTMNSDPGLAVGYTAFNGVDFEGTFHVNTQTDDDYAGFIFGYQDSSSFYVVMWKQTEQTYWQATPFRAVAEPGIQLKAVKSKTGPGEHLRNSLWHTGDTSDQVRLLWKDSRNVGWKDKVSYRWFLQHRPQVGYIRVRFYEGSELVADSGVTIDTTMRGGRLGVFCFSQENIIWSNLKYRCNDTIPEDFQEFQTQNFDRFDN

SEQ ID NO: 13209 - protein, 961 aa, Homo Sapiens
MLAPRGAAVLLLHLVLQRWLAAGAQATPQVFDLLPSSSQRLNPGALLPVLTDPALNDLYVISTFKLQTKSSATIFGLYSSTDNSKYFEFTVMGRLNKAILRYLKNDGKVHLVVFNNLQLADGRRHRILLRLSNLQRGAGSLELYLDCIQVDSVHNLPRAFAGPSQKPETIELRTFQRKPQDFLEELKLVVRGSLFQVASLQDCFLQQSEPLAATGTGDFNRQFLGQMTQLNQLLGEVKDLLRQQVKETSFLRNTIAECQACGPLKFQSPTPSTVVPPAPPAPPTRPPRRCDSNPCFRGVQCTDSRDGFQCGPCPEGYTGNGITCIDVDECKYHPCYPGVHCINLSPGFRCDACPVGFTGPMVQGVGISFAKSNKQVCTDIDECRNGACVPNSICVNTLGSYRCGPCKPGYTGDQIRGCKAERNCRNPELNPCSVNAQCIEERQGDVTCVCGVGWAGDGYICGKDVDIDSYPDEELPCSARNCKKDNCKYVPNSGQEDADRDGIGDACDEDADGDGILNEQDNCVLIHNVDQRNSDKDIFGDACDNCLSVLNNDQKDTDGDGRGDACDDDMDGDGIKNILDNCPKFPNRDQRDKDGDGVGDACDSCPDVSNPNQSDVDNDLVGDSCDTNQDSDGDGHQDSTDNCPTVINSAQLDTDKDGIGDECDDDDDNDGIPDLVPPGPDNCRLVPNPAQEDSNSDGVGDICESDFDQDQVIDRIDVCPENAEVTLTDFRAYQTVVLDPEGDAQIDPNWVVLNQGMEIVQTMNSDPGLAVGYTAFNGVDFEGTFHVNTQTDDDYAGFIFGYQDSSSFYVVMWKQTEQTYWQATPFRAVAEPGIQLKAVKSKTGPGEHLRNSLWHTGDTSDQVRLLWKDSRNVGWKDKVSYRWFLQHRPQVGYIRVRFYEGSELVADSGVTIDTTMRGGRLGVFCFSQENIIWSNLKYRCNDTIPEDFQEFQTQNFDRFDN

SEQ ID NO: 13210 - protein, 57 aa, Homo Sapiens
HDGKMLASASEDHFIDIAEVETVQQTHSASQKAAGPLAKRPVCSIVIIPPSLLPFES

SEQ ID NO: 13211 - protein, 105 aa, Homo Sapiens
MAVPAAAMGPSALGQSGPGSMAPWCSVSSGPSRYVLGMQELFRGHSKTREFLAHSAKVHSVAWSCDGRRLASGSFDKTASVFLLEKDRLGRTLISAGVLMGRPLL

SEQ ID NO: 13212 - protein, 105 aa, Homo Sapiens; identical to SEQ ID NO: 13211

SEQ ID NO: 13213 - protein, 351 aa, Homo Sapiens
MAVPAAAMGPSALGQSGPGSMAPWCSVSSGPSRYVLGMQELFRGHSKTREFLAHSAKVHSVAWSCDGRRLASGSFDKTASVFLLEKDRLVKENNYRGHGDSVDQLCWHPSNPDLFVTASGDKTIRIWDVRTTKCIATVNTKGENINICWSPDGQTIAVGNKDDVVTFIDAKTHRSKAEEQFKFEVNEISWNNDNNMFFLTNGNGCINILSYPELKPVQSINAHPSNCICIKFDPMGKYFATGSADALVSLWDVDELVCVRCFSRLDWPVRTLSFSHDGKMLASASEDHFIDIAEVETGDKLWEVQCESPTFTVAWHPKRPLLAFACDDKDGKYDSSREAGTVKLFGLPNDS

SEQ ID NO: 13214 - protein, 327 aa, Homo Sapiens
MAVPAAAMGPSALGQSGPGSMAPWCSVSSGPSRYVLGMQELFRGHSKTREFLAHSAKVHSVAWSCDGRRLASGSFDKTASVFLLEKDRLVKENNYRGHGDSVDQLCWHPSNPDLFVTASGDKTIRIWDVRTTKCIATVNTKGENINICWSPDGQTIAVGNKDDVVTFIDAKTHRSKAEEQFKFEVNEISWNNDNNMFFLTNGNGCINILSYPELKPVQSINAHPSNCICIKFDPMGKYFATGSADALVSLWDVDELVCVRCFSRLDWPVRTLSFSHDGKMLASASEDHFIDIAEVETGNFMRIYRLSPLAVRTSLVISSLHVTTSPA

SEQ ID NO: 13215 - protein, 166 aa, Homo Sapiens
MAWLCGSLPVVVAVTAMETAARQECYPELKPVQSINAHPSNCICIKFDPMGKYFATGSADALVSLWDVDELVCVRCFSRLDWPVRTLSFSHDGKMLASASEDHFIDIAEVETGDKLWEVQCESPTFTVAWHPKRPLLAFACDDKDGKYDSSREAGTVKLFGLPNDS

SEQ ID NO: 13216 - protein, 13 aa, Homo Sapiens
VAVTAMETAARQE

SEQ ID NO: 13217 - protein, 55 aa, Homo Sapiens
VVVAVTAMETAARQEWSKKTIIGDMGIVWTSFVGIQVILTYLLRRPEIKPFASGM

SEQ ID NO: 13218 - protein, 56 aa, Homo Sapiens
  misc_feature (1)..(1): Xaa can be any naturally occurring amino acid
XQSINAHPSNCICIKFDPMGKYFATGSADALVSLWDVDELVCVRCFSRGQTMGGTV

SEQ ID NO: 13219 - protein, 75 aa, Homo Sapiens
  misc_feature (1)..(1): Xaa can be any naturally occurring amino acid
XVSLWDVDELVCVRCFSRLDWPVRTLSFSHDGKMLASASEDHFIDIAEVETDRVSFCHPAWCAVVQAILLPQPPK

SEQ ID NO: 13220 - protein, 349 aa, Homo Sapiens
MELTELLLVVMLLLTARLTLSSPAPPACDLRVLSKLLRDSHVLHSRLSQCPEVHPLPTPVLLPAVDFSLGEWKTQMEETKAQDILGAVTLLLEGVMAARGQLGPTCLSSLLGQLSGQVRLLLGALQSLLGTQGRTTAHKDPNAIFLSFQHLLRGKVRFLMLVGGSTLCVRRAPPTTAVPSRTSLVLTLNELPNRTSGLLETNFTASARTTGSGLLKWQQGFRAKIPGLLNQTSRSLDQIPGYLNRIHELLNGTRGLFPGPSRRTLGAPDISSGTSDTGSLPPNLQPGYSPSPTHPPTGQYTLFPLPPTLPTPVVQLHPLLPDPSAPTPTPTSPLLNTSYTHSQNLSQEG

SEQ ID NO: 13221 - protein, 286 aa, Homo Sapiens
MELTELLLVVMLLLTARLTLSSPAPPACDLRVLSKLLRDSHVLHSRLSQCPEVHPLPTPVLLPAVDFSLGEWKTQMEETKAQDILGAVTLLLEGVMAARGQLGPTCLSSLLGQLSGQVRLLLGALQSLLGTQLPPQGRTTAHKDPNAIFLSFQHLLRGKDFWIVGDKLHCLSQNYWLWASEVAAGIQSQDSWSAEPNLQVPGPNPRIPEQDTRTLEWNSWTLSWTLTQDPRSPGHFLRNIRHRLPATQPPAWIFSFPNPSSYWTVYALPSSTHLAHPCGPAPPPAS

SEQ ID NO: 13222 - protein, 353 aa, Homo Sapiens
MELTELLLVVMLLLTARLTLSSPAPPACDLRVLSKLLRDSHVLHSRLSQCPEVHPLPTPVLLPAVDFSLGEWKTQMEETKAQDILGAVTLLLEGVMAARGQLGPTCLSSLLGQLSGQVRLLLGALQSLLGTQLPPQGRTTAHKDPNAIFLSFQHLLRGKVRFLMLVGGSTLCVRRAPPTTAVPSRTSLVLTLNELPNRTSGLLETNFTASARTTGSGLLKWQQGFRAKIPGLLNQTSRSLDQIPGYLNRIHELLNGTRGLFPGPSRRTLGAPDISSGTSDTGSLPPNLQPGYSPSPTHPPTGQYTLFPLPPTLPTPVVQLHPLLPDPSAPTPTPTSPLLNTSYTHSQNLSQEG

SEQ ID NO: 13223 - protein, 353 aa, Homo Sapiens; identical to SEQ ID NO: 13222

SEQ ID NO: 13224 - protein, 353 aa, Homo Sapiens; identical to SEQ ID NO: 13222

SEQ ID NO: 13225 - protein, 12 aa, Homo Sapiens
  misc_feature (1)..(1): Xaa can be any naturally occurring amino acid
XQSLLGTQTREA

SEQ ID NO: 13226 - protein, 219 aa, Homo Sapiens
MFVSYLILTLLHVQTAVLARPGGESIGCDDYLGSDKVVDKCGVCGGDNTGCQVVSGVFKHALTSLGYHRVVEIPEGATKINITEMYKSNKKKSHLKPATRGSQFSSVKVCSVPAACKLLGTPGRARQPVPAPRELEHDKNSPHCAYLSLYLTSLAQSSWRVFSLFSYVLIYLFSKYLAFNTLFALKRMALQRDRKEKTRAWCIFIKLCGREIQILPGPV

SEQ ID NO: 13227 - protein, 658 aa, Homo Sapiens
MFVSYLILTLLHVQTAVLARPGGESIGCDDYLGSDKVVDKCGVCGGDNTGCQVVSGVFKHALTSLGYHRVVEIPEGATKINITEMYKSNNYLALRSRSGRSIINGNWAIDRPGKYEGGGTMFTYKRPNEISSTAGESFLAEGPTNEILDVYMIHQQPNPGVHYEYVIMGTNAISPQVPPHRRPGEPFNGQMVTEGRSQEEGEQKGRNEEKEDLRGEAPEMFTSESAQTFPVRHPDRFSPHRPDNLVPPAPQPPRRSRDHNWKQLGTTECSTTCGKGSQYPIFRCVHRSTHEEAPESYCDSSMKPTPEEEPCNIFPCPAFWDIGEWSECSKTCGLGMQHRQVLCRQVYANRSLTVQPYRCQHLEKPETTSTCQLKICSEWQIRTDWTSCSVPCGVGQRTRDVKCVSNIGDVVDDEECNMKLRPNDIENCDMGPCAKSWFLTEWSERCSAECGAGVRTRSVVCMTNHVSSLPLEGCGNNRPAEATPCDNGPCTGKVEWFAGSWSQCSIECGSGTQQREVICVRKNADTFEVLDPSECSFLEKPPSQQSCHLKPCGAKWFSTEWSMCSKSCQGGFRVREVRCLSDDMTLSNLCDPQLKPEERESCNPQDCVPEVDENCKDKYYNCNVVVQARLCVYNYYKTACCASCTRVANRQTGFLGSR

SEQ ID NO: 13228 - protein, 101 aa, Homo Sapiens
MVSHFMGSLSVLCFLLLLGFQFVCPQPSTQHRKVPQRMAAEGAPEDDGGGGAPGVWGAWGPWSACSRSCSGGVMEQTRPCLPRSYRLRGGQRPGAPARAFA

SEQ ID NO: 13229 - protein, 1018 aa, Homo Sapiens
MVSHFMGSLSVLCFLLLLGFQFVCPQPSTQHRKVPQRMAAEGAPEDDGGGGAPGVWGAWGPWSACSRSCSGGVMEQTRPCLPRSYRLRGGQRPGAPARAFADHVVSAVRTSVPLHRSRDETPALAGTDASRQGPTVLRGSRHPQPQGLEVTGDRRSRTRGTIGPGKYGYGKAPYILPLQTDTAHTPQRLRRQKLSSRHSRSQGASSARHGYSSPAHQVPQHGPLYQSDSGPRSGLQAAEAPIYQLPLTHDQGYPAASSLFHSPETSNNHGVGTHGATQSFSQPARSTAISCIGAYRQYKLCNTNVCPESSRSIREVQCASYNNKPFMGRFYEWEPFAEVKGNRKCELNCQAMGYRFYVRQAEKVIDGTPCDQNGTAICVSGQCKSIGCDDYLGSDKVVDKCGVCGGDNTGCQVVSGVFKHALTSLGYHRVVEIPEGATKINITEMYKSNNYLALRSRSGRSIINGNWAIDRPGKYEGGGTMFTYKRPNEISSTAGESFLAEGPTNEILDVYMIHQQPNPGVHYEYVIMGTNAISPQVPPHRRPGEPFNGQMVTEGRSQEEGEQKGRNEEKEDLRGEAPEMFTSESAQTFPVRHPDRFSPHRPDNLVPPAPQPPRRSRDHNWKQLGTTECSTTCGKGSQYPIFRCVHRSTHEEAPESYCDSSMKPTPEEEPCNIFPCPAFWDIGEWSECSKTCGLGMQHRQVLCRQVYANRSLTVQPYRCQHLEKPETTSTCQLKICSEWQIRTDWTSCSVPCGVGQRTRDVKCVSNIGDVVDDEECNMKLRPNDIENCDMGPCAKSWFLTEWSERCSAECGAGVRTRSVVCMTNHVSSLPLEGCGNNRPAEATPCDNGPCTGKVEWFAGSWSQCSIECGSGTQQREVICVRKNADTFEVLDPSECSFLEKPPSQQSCHLKPCGAKWFSTEWSMCSKSCQGGFRVREVRCLSDDMTLSNLCDPQLKPEERESCNPQDCVPEVDENCKDKYYNCNVVVQARLCVYNYYKTACCASCTRVANRQTGFLGSR

SEQ ID NO: 13230 - protein, 37 aa, Homo Sapiens
MNLAISIALLLTGLPRAEGDQPNGLPSGPEPSSGLPP

SEQ ID NO: 13231 - protein, 144 aa, Homo Sapiens
MNLAISIALLLTVDQSLRLDCRHENTSSSPIQYEFSLTRETKKHVLFGTVGVPEHTYRSRTNFTSKYNMKVLYLSAFTSKDEGTYTCALHHSGHSPPISSQNVTVLRDKLVKCEGISLLAQNTSWLLLLLLSLSLLQATDFMSL

SEQ ID NO: 13232 - protein, 153 aa, Homo Sapiens
MNLAISIALLLTVLQVSRGQKVTSLTACLVDQSLRLDCRHENTSSSPIQYEFSLTRETKKHVLFGTVGVPEHTYRSRTNFTSKYNMKVLYLSAFTSKDEGTYTCALHHSGHSPPISSQNVTVLRDKLVKCEGISLLAQNTSWLLLLLLSLSLL

SEQ ID NO: 13233 - protein, 161 aa, Homo Sapiens
MNLAISIALLLTVLQVSRGQKVTSLTACLVDQSLRLDCRHENTSSSPIQYEFSLTRETKKHVLFGTVGVPEHTYRSRTNFTSKYNMKVLYLSAFTSKDEGTYTCALHHSGHSPPISSQNVTVLRDKLVKCEGISLLAQNTSWLLLLLLSLSLLQATDFMSL

SEQ ID NO: 13234 - protein, 161 aa, Homo Sapiens; identical to SEQ ID NO: 13233

SEQ ID NO: 13235 - protein, 165 aa, Homo Sapiens
MNLAISIALLLTVLQVSRGQKVTSLTACLVDQSLRLDCRHENTSSSPIQYEFSLTRETKKHVLFGTVGVPEHTYRSRTNFTSKYNMKVLYLSAFTSKDEGTYTCALHHSGHSPPISSQNVTVLRGHGFHVPVTGGAHGGDRKPQVPVQRSYFSESADPLPPIPQT

SEQ ID NO: 13236 - protein, 1138 aa, Homo Sapiens
MVWRVPPFLLPILFLASHVGAAVDLTLLANLRLTDPQRFFLTCVSGEAGAGRGSDAWGPPLLLEKDDRIVRTPPGPPLRLARNGSHQVTLRGFSKPSDLVGVFSCVGGAGARRTRVIYVHNSPGAHLLPDKVTHTVNKGDTAVLSARVHKEKQTDVIWKSNGSYFYTLDWHEAQDGRFLLQLPNVQPPSSGIYSATYLEASPLGSAFFRLIVRGCGAGRWGPGCTKECPGCLHGGVCHDHDGECVCPPGFTGTRCEQACREGRFGQSCQEQCPGISGCRGLTFCLPDPYGCSCGSGWRGSQCQEACAPGHFGADCRLQCQCQNGGTCDRFSGCVCPSGWHGVHCEKSDRIPQILNMASELEFNLETMPRINCAAAGNPFPVRGSIELRKPDGTVLLSTKAIVEPEKTTAEFEVPRLVLADSGFWECRVSTSGGQDSRRFKVNVKVPPVPLAAPRLLTKQSRQLVVSPLVSFSGDGPISTVRLHYRPQDSTMDWSTIVVDPSENVTLMNLRPKTGYSVRVQLSRPGEGGEGAWGPPTLMTTDCPEPLLQPWLEGWHVEGTDRLRVSWSLPLVPGPLVGDGFLLRLWDGTRGQERRENVSSPQARTALLTGLTPGTHYQLDVQLYHCTLLGPASPPAHVLLPPSGPPAPRHLHAQALSDSEIQLTWKHPEALPGPISKYVVEVQVAGGAGDPLWIDVDRPEETSTIIRGLNASTRYLFRMRASIQGLGDWSNTVEESTLGNGLQAEGPVQESRAAEEGLDQQLILAVVGSVSATCLTILAALLTLVCIRRSCLHRRRTFTYQSGSGEETILQFSSGTLTLTRRPKLQPEPLSYPVLEWEDITFEDLIGEGNFGQVIRAMIKKDGLKMNAAIKMLKEYASENDHRDFAGELEVLCKLGHHPNIINLLGACKNRGYLYIAIEYAPYGNLLDFLRKSRVLETDPAFAREHGTASTLSSRQLLRFASDAANGMQYLSEKQFIHRDLAARNVLVGENLASKIADFGLSRGEEVYVKKTMGRLPVRWMAIESLNYSVYTTKSDVWSFGVLLWEIVSLGGTPYCGMTCAELYEKLPQGYRMEQPRNCDDEVYELMRQCWRDRPYERPPFAQIALQLGRMLEARKAYVNMSLFENFTYAGIDATAEEA

SEQ ID NO: 13237 - protein, 379 aa, Homo Sapiens
MVWRVPPFLLPILFLASHVGAAVDLTLLANLRLTDPQRFFLTCVSGEAGAGRGSDAWGPPLLLEKDDRIVRTPPGPPLRLARNGSHQVTLRGFSKPSDLVGVFSCVGGAGARRTRVIYVHNSPGAHLLPDKVTHTVNKGDTAVLSARVHKEKQTDVIWKSNGSYFYTLDWHEAQDGRFLLQLPNVQPPSSGIYSATYLEASPLGSAFFRLIVRGCGAGRWGPGCTKECPGCLHGGVCHDHDGECVCPPGFTGTRCEQACREGRFGQSCQEQCPGISGCRGLTFCLPDPYGCSCGSGWRGSQCQEACAPGHFGADCRLQCQCQNGGTCDRFSGCVCPSGWHGVHCEKSGWRDWVDTSTEKQNTDEGRFGGHVSAPVGAPG

SEQ ID NO: 13238 - protein, 71 aa, Homo Sapiens
MEVPPPAPRSFLCRALCLFPRVFAAEAVTADSEVLEERQKRLPYVPEPYYPESGWDRLRELFGKDCHGKSF

SEQ ID NO: 13239 - protein, 175 aa, Homo Sapiens
MEVPPPAPRSFLCRALCLFPRVFAAEAVTADSEVLEERQKRLPYVPEPYYPESGWDRLRELFGKDEQQRISKDLANICKTAATAGIIGWVYGGIPAFIHAKQQYIEQSQAEIYHNRFDAVQSAHRAATRGFIRYGWRWGWRTAVFVTIFNTVNTSLNVYRNKDALSHFVIAGALL

SEQ ID NO: 13240 - protein, 285 aa, Homo Sapiens
MEVPPPAPRSFLCRALCLFPRVFAAEAVTADSEVLEERQKRLPYVPEPYYPESGWDRLRELFGKDEQQRISKDLANICKTAATAGIIGWVYGGIPAFIHAKQQYIEQSQAEIYHNRFDAVQSAHRAATRGFIRYGWRWGWRTAVFVTIFNTVNTSLNVYRNKDALSHFVIAGAVTGSLFRINVGLRGLVAGGIIGALLGTPVGGLLMAFQKYSGETVQERKQKDRKALHELKLEEWKGRLQVTEHLPEKIESSLQEDEPENDAKKIEALLNLPRNPSVIDKQDKD

SEQ ID NO: 13241 - protein, 90 aa, Homo Sapiens
MEVPPPAPRSFLCRALCLFPRVFAAEAVTADSEVLEERQKRLPYVPEPYYPESGWDRLRELFGKDNLHIVLPHEASFVMAGAGVGELQCL

SEQ ID NO: 13242 - protein, 151 aa, Homo Sapiens
MEVPPPAPRSFLCRALCLFPRVFAAEAVTADSEVLEERQKRLPYVPEPYYPESGWDRLRELFGKDTPVGGLLMAFQKYSGETVQERKQKDRKALHELKLEEWKGRLQVTEHLPEKIESSLQEDEPENDAKKIEALLNLPRNPSVIDKQDKD

SEQ ID NO: 13243 - protein, 150 aa, Homo Sapiens
MEVPPPAPRSFLCRALCLFPRVFAAEAVTADSEVLEERQKRLPYVPEPYYPESGWDRLRELFGKDTVNTSLNVYRNKDALSHFVIAGAVTGSLFRINVGLRGLVAGGIIGALLGTPVGGLLMAFQKYSGETVQERKQKDRKALHELKLEE

SEQ ID NO: 13244 - protein, 65 aa, Homo Sapiens
MEVPPPAPRSFLCRALCLFPRVFAAEAVTADSEVLEERQKRLPYVPEPYYPESGWDRLRELFGKE

SEQ ID NO: 13245 - protein, 38 aa, Homo Sapiens
  misc_feature (1)..(1): Xaa can be any naturally occurring amino acid
XTADSEVLEERQKRLPYVPEPYYPESGWDRLRELFGKE

SEQ ID NO: 13246 - protein, 136 aa, Homo Sapiens
MAPFEPLASGILLLLWLIAPSRACTCVPPHPQTAFCNSDLVIRAKFVGTPEVNQTTLYQRYEIKMTKMYKGFQALGDAADIRFVYTPAMESVCGYFHRSHNRSEEFLIAGEAPSPRPVPHQPVPGARPSNHEGARL

SEQ ID NO: 13247 - protein, 207 aa, Homo Sapiens
MAPFEPLASGILLLLWLIAPSRACTCVPPHPQTAFCNSDLVIRAKFVGTPEVNQTTLYQRYEIKMTKMYKGFQALGDAADIRFVYTPAMESVCGYFHRSHNRSEEFLIAGKLQDGLLHITTCSFVAPWNSLSLAQRRGFTKTYTVGCEECTVFPCLSIPCKLQSGTHCLWTDQLLQGSEKGFQSRHLACLPREPGLCTWQSLRSQIA

SEQ ID NO: 13248 - protein, 96 aa, Homo Sapiens [sequence omitted]

SEQ ID NO: 13249 - protein, 143 aa, Homo Sapiens
MTKMYKGFQALGDAADIRFVYTPAMESVCGYFHRSHNRSEEFLIAGKLQDGLLHITTCSFVAPWNSLSLAQRRGFTKTYTVGCEECTVFPCLSIPCKLQSGTHCLWTDQLLQGSEKGFQSRHLACLPREPGLCTWQSLRSQIA

SEQ ID NO: 13250 - protein, 165 aa, Homo Sapiens
  misc_feature (1)..(1): Xaa can be any naturally occurring amino acid
XPRALCHTNQSLGRGLATTRGRGSDGNGPTGNGDHPNFSLSEGRAFGSLAAQPITSCLSVPAPPFSLGKLQDGLLHITTCSFVAPWNSLSLAQRRGFTKTYTVGCEECTVFPCLSIPCKLQSGTHCLWTDQLLQGSEKGFQSRHLACLPREPGLCTWQSLRSQIA

SEQ ID NO: 13251 - protein, 143 aa, Homo Sapiens
MFKGPEKDIEFIYTAPSSAVCGVSLDVGGKKEYLIAGKAEGDGKMHITLCDFIVPWDTLSTTQKKSLNHRYQMGCECKITRCPMIPCYISSPDECLWMDWVTEKNINGHQAKFFACIKRSDGSCAWYRGAAPPKQEFLDIEDP

SEQ ID NO: 13252 - protein, 143 aa, Homo Sapiens; identical to SEQ ID NO: 13251

SEQ ID NO: 13253 - protein, 143 aa, Homo Sapiens; identical to SEQ ID NO: 13251

SEQ ID NO: 13254 - protein, 109 aa, Homo Sapiens
MFKGPEKDIEFIYTAPSSAVCGVSLDVGGKKEYLIAGKAEGDGKMHITLCDFIVPWDTLSTTQKKSLNHRYQMGCECKVSRSCLCWSIASSQCLQMDGRDFDPWLSRTR

SEQ ID NO: 13255 - protein, 220 aa, Homo Sapiens
MGAAARTLRLALGLLLLATLLRPADACSCSPVHPQQAFCNADVVIRAKAVSEKEVDSGNDIYGNPIKRIQYEIKQIKMFKGPEKDIEFIYTAPSSAVCGVSLDVGGKKEYLIAGKAEGDGKMHITLCDFIVPWDTLSTTQKKSLNHRYQMGCECKITRCPMIPCYISSPDECLWMDWVTEKNINGHQAKFFACIKRSDGSCAWYRGAAPPKQEFLDIEDP

SEQ ID NO: 13256 - protein, 211 aa, Homo Sapiens
MTPWLGLIVLLGSWSLGDWGAEACTCSPSHPQDAFCNSDIVIRAKVVGKKLVKEGPFGTLVYTIKQMKMYRGFTKMPHVQYIHTEASESLCGLKLEVNKYQYLLTGRVYDGKMYTGLCNFVERWDQLTLSQRKGLNYRYHLGCNCKIKSCYYLPCFVTSKNECLWTDMLSNFGYPGYQSKHYACIRQKGGYCSWYRGWAPPDKSIINATDP

SEQ ID NO: 13257 - protein, 224 aa, Homo Sapiens
MPGSPRPAPSWVLLLRLLALLRPPGLGEACSCAPAHPQQHICHSALVIRAKISSEKVVPASADPADTEKMLRYEIKQIKMFKGFEKVKDVQYIYTPFDSSLCGVKLEANSQKQYLLTGQVLSDGKVFIHLCNYIEPWEDLSLVQRESLNHHYHLNCGCQITTCYTVPCTISAPNECLWTDWLLERKLYGYQAQHYVCMKHVDGTCSWYRGHLPLRKEFVDIVQP

SEQ ID NO: 13258 - protein, 362 aa, Homo Sapiens
MHGGRIYPVLGTYWDNCNRCTCQENRQWQCDQEPCLVDPDMIKAINQGNYGWQAGNHSAFWGMTLDEGIRYRLGTIRPSSSVMNMHEIYTVLNPGEVLPTAFEASEKWPNLIHEPLDQGNCAGSWAFSTAAVASDRVSIHSLGHMTPVLSPQNLLSCDTHQQQGCRGGRLDGAWWFLRRRGVVSDHCYPFSGRERDEAGPAPPCMMHSRAMGRGKRQATAHCPNSYVNNNDIYQVTPVYRLGSNDKEIMKELMENGPVQALMEVHEDFFLYKGGIYSHTPVSLGRPERYRRHGTHSVKITGWGEETLPDGRTLKYWTAANSWGPAWGERGHFRIVRGVNECDIESFVLGVWGRVGMEDMGHH

SEQ ID NO: 13259 - protein, 467 aa, Homo Sapiens
MWRCPLGLLLLLPLAGHLALGAQQGRGRRELAPGLHLRGIRDAGGRYCQEQDLCCRGRADDCALPYLGAICYCDLFCNRTVSDCCPDFWDFCLGVPPPFPPIQGCMHGGRIYPVLGTYWDNCNRCTCQENRQWQCDQEPCLVDPDMIKAINQGNYGWQAGNHSAFWGMTLDEGIRYRLGTIRPSSSVMNMHEIYTVLNPGEVLPTAFEASEKWPNLIHEPLDQGNCAGSWAFSTAAVASDRVSIHSLGHMTPVLSPQNLLSCDTHQQQGCRGGRLDGAWWFLRRRGVVSDHCYPFSGRERDEAGPAPPCMMHSRAMGRGKRQATAHCPNSYVNNNDIYQVTPVYRLGSNDKEIMKELMENGPVQALMEVHEDFFLYKGGIYSHTPVSLGRPERYRRHGTHSVKITGWGEETLPDGRTLKYWTAANSWGPAWGERGHFRIVRGVNECDIESFVLGVWGRVGMEDMGHH

SEQ ID NO: 13260 - protein, 436 aa, Homo Sapiens
MWRCPLGLLLLLPLAGHLALGAQQGRGRRELAPGLHLRGIRDAGGRYCQEQDLCCRGRADDCALPYLGAICYCDLFCNRTVSDCCPDFWDFCLGVPPPFPPIQGCMHGGRIYPVLGTYWDNCNRCWQAGNHSAFWGMTLDEGIRYRLGTIRPSSSVMNMHEIYTVLNPGEVLPTAFEASEKWPNLIHEPLDQGNCAGSWAFSTAAVASDRVSIHSLGHMTPVLSPQNLLSCDTHQQQGCRGGRLDGAWWFLRRRGVVSDHCYPFSGRERDEAGPAPPCMMHSRAMGRGKRQATAHCPNSYVNNNDIYQVTPVYRLGSNDKEIMKELMENGPVQALMEVHEDFFLYKGGIYSHTPVSLGRPERYRRHGTHSVKITGWGEETLPDGRTLKYWTAANSWGPAWGERGHFRIVRGVNECDIESFVLGVWGRVGMEDMGHH

SEQ ID NO: 13261 - protein, 85 aa, Homo Sapiens
GGRALKENPVDLPATEQKENCLDCYMDPLRLSLLPPRARKPVCPPSLCSSVITIGDLVLDSDEEENGQGEGKVSGKEQKAGKGDG

SEQ ID NO: 13262 - protein, 71 aa, Homo Sapiens
MATPLVAGPAALRFAAAASWQVVRGRCVEHFPRVLEFLRSLRAVAPGLVRYRHHERLCMGLKAKSALLLTQ

SEQ ID NO: 13263 - protein, 416 aa, Homo Sapiens
MATPLVAGPAALRFAAAASWQVVRGRCVEHFPRVLEFLRSLRAVAPGLVRYRHHERLCMGLKAKTKQDLRKILEAQETFYQQVKQLSEAPVDLASKLQELEQEYGEPFLAAMEKLLFEYLCQLEKALPTPQAQQLQDVLSWMQPGVSITSSLAWRQYGVDMGWLLPECSVTDSVNLAEPMEQNPPQQQRLALHNPLPKAKPGTHLPQGPSSRTHPEPLAGRHFNLAPLGRRRVQSQWASTRGGHKERPTVMLFPFRNLGSPTQVISKPESKEEHAIYTADLAMGTRAASTGKSKSPCQTLGGRALKENPVDLPATEQKENCLDCYMDPLRLSLLPPRARKPVCPPSLCSSVITIGDLVLDSDEEENGQGEGKESLENYQKTKFDTLIPTLCEYLPPSGHGAIPVSSCDCRDSSRPL

SEQ ID NO: 13264 - protein, 451 aa, Homo Sapiens
MATPLVAGPAALRFAAAASWQVVRGRCVEHFPRVLEFLRSLRAVAPGLVRYRHHERLCMGLKAKVVVELILQGRPWAQVLKALNHHFPESGPIVRDPKATKQDLRKILEAQETFYQQVKQLSEAPVDLASKLQELEQEYGEPFLAAMEKLLFEYLCQLEKALPTPQAQQLQDVLSWMQPGVSITSSLAWRQYGVDMGWLLPECSVTDSVNLAEPMEQNPPQQQRLALHNPLPKAKPGTHLPQGPSSRTHPEPLAGRHFNLAPLGRRRVQSQWASTRGGHKERPTVMLFPFRNLGSPTQVISKPESKEEHAIYTADLAMGTRAASTGKSKSPCQTLGGRALKENPVDLPATEQKENCLDCYMDPLRLSLLPPRARKPVCPPSLCSSVITIGDLVLDSDEEENGQGEGKESLENYQKTKFDTLIPTLCEYLPPSGHGAIPVSSCDCRDSSRPL

SEQ ID NO: 13265 - protein, 354 aa, Homo Sapiens
MATPLVAGPAALRFAAAASWQVVRGRCVEHFPRVLEFLRSLRAVAPGLVRYRHHERLCMGLKAKVVVELILQGRPWAQVLKALNHHFPESGPIVRDPKATKQDLRKILEAQETFYQQVKQLSEAPVDLASKLQELEQEYGEPFLAAMEKLLFEYLCQLEKALPTPQAQQLQDVLSWMQPGVSITSSLAWRQYGVDMGWLLPECSVTDSVNLAEPMEQNPPQQQRLALHNPLPKAKPGTHLPQGPSSRTHPEPLAGRHFNLAPLGRRRVQSQWASTRGGHKERPTVMLFPFRNLGSPTQVISKPESKEEHAIYTADLAMGTRAASTGKSKSPCQTLGGRALKENPVDLPATEQKE

SEQ ID NO: 13266 - protein, 451 aa, Homo Sapiens; identical to SEQ ID NO: 13264

SEQ ID NO: 13267 - protein, 290 aa, Homo Sapiens
MATPLVAGPAALRFAAAASWQVVRGRCVEHFPRVLEFLRSLRAVAPGLVRYRHHERLCMGLKAKVVVELILQGRPWAQVLKALNHHFPESGPIVRDPKATKQDLRKILEAQETFYQQVKQLSEAPVDLASKLQLQDVLSWMQPGVSITSSLAWRQYGVDMGWLLPECSVTDSVNLAEPMEQNPPQQQRLALHNPLPKAKPGTHLPQGPSSRTHPEPLAGRHFNLAPLGRRRVQSQWASTRGGHKERPTVMLFPFRNLGSPTQVISKPESKEEHAIYTADLAMGTRAASTG

SEQ ID NO: 13268 - protein, 140 aa, Homo Sapiens
MATPLVAGPAALRFAAAASWQVVRGRCVEHFPRVLEFLRSLRAVAPGLVRYRHHERLCMGLKAKVVVELILQGRPWAQVLKALNHHFPESGPIVRDPKATKQDLRKILEAQETFYQQVKQLSEAPVDLASKLQSALLLTQ

SEQ ID NO: 13269 - protein, 140 aa, Homo Sapiens; identical to SEQ ID NO: 13268

SEQ ID NO: 13270 - protein, 146 aa, Homo Sapiens
MEKLLFEYLCQLEKALPTPQAQQLQDVLSWMQPGVSITSSLAWRQYGVDMGWLLPECSVTDSVNLAEPMEQNPPQQQRLALHNPLPKAKPGTHLPQGPSSRTHPEPLAGRHFNLAPLGRRRVQSQWASTRGGHKERPTVMLFPFRN

SEQ ID NO: 13271 - protein, 1015 aa, Homo Sapiens
MPRATALGALVSLLLLLPLPRGAGGLGERPDATADYSELDGEEGTEQQLEHYHDPCKAAVFWGDIALDEDDLKLFHIDKARDWTKQTVGATGHSTGGLEEQASESSPDTTAMDTGTKEAGKDGRENTTLLHSPGTLHAAAKTFSPRVRRATTSRTERIWPGGVIPYVIGGNFTGSQRAIFKQAMRHWEKHTCVTFIERTDEESFIVFSYRTCGCCSYVGRRGGGPQAISIGKNCDKFGIVAHELGHVVGFWHEHTRPDRDQHVTIIRENIQPGQEYNFLKMEAGEVSSLGETYDFDSIMHYARNTFSRGVFLDTILPRQDDNGVRPTIGQRVRLSQGDIAQARKLYKCPACGETLQDTTGNFSAPGFPNGYPSYSHCVWRISVTPGEKIVLNFTSMDLFKSRLCWYDYVEVRDGYWRKAPLLGRFCGDKIPEPLVSTDSRLWVEFRSSSNILGKGFFAAYEATCGGDMNKDAGQIQSPNYPDDYRPSKECVWRITVSEGFHVGLTFQAFEIERHDSCAYDYLEVRDGPTEESALIGHFCGYEKPEDVKSSSNRLWMKFVSDGSINKAGFAANFFKEVDECSWPDHGGCEHRCVNTLGSYKCACDPGYELAADKKMCEVACGGFITKLNGTITSPGWPKEYPTNKNCVWQVVAPAQYRISLQFEVFELEGNDVCKYDFVEVRSGLSPDAKLHGRFCGSETPEVITSQSNNMRVEFKSDNTVSKRGFRAHFFSDKDECAKDNGGCQHECVNTFGSYLCRCRNGYWLHENGHDCKEAGCAHKISSVEGTLASPNWPDKYPSRRECTWNISSTAGHRVKLTFNEFEIEQHQECAYDHLEMYDGPDSLAPILGRFCGSKKPDPTVASGSSMFLRFYSDASVQRKGFQAVHSTECGGRLKAEVQTKELYSHAQFGDNNYPSEARCDWVIVAEDGYGVELTFRTFEVEEEADCGYDYMEAYDGYDSSAPRLGRFCGSGPLEEIYSAGDSLMIRFRTDDTINKKGFHARYTSTKFQDALHMKK

SEQ ID NO: 13272 - protein, 23 aa, Homo Sapiens
MTSIFHFAIIFMLILQIRIQLSE

SEQ ID NO: 13273 - protein, 48 aa, Homo Sapiens
MTSIFHFAIIFMLILQIRIQLSEESEFLVDRSKNGLIHVPKDLSQKTT

SEQ ID NO: 13274 - protein, 90 aa, Homo Sapiens
MTSIFHFAIIFMLILQIRIQLSEESEFLVDRSKNGLIHVPKDLSQKTTILNISQNYISELWTSDILSLSKLRILIISHNRIQYLDISVFK

SEQ ID NO: 13275 - protein, 161 aa, Homo Sapiens
MTSIFHFAIIFMLILQIRIQLSEESEFLVDRSKNGLIHVPKDLSQKTTILNISQNYISELWTSDILSLSKLRILIISHNRIQYLDISVFKFNQELEYLDLSHNKLVKISCHPTVNLKHLDLSFNAFDALPICKEFGNMSQLKFLGLSTTHLEKSSVLPIAH

SEQ ID NO: 13276 - protein, 786 aa, Homo Sapiens
MTSIFHFAIIFMLILQIRIQLSEESEFLVDRSKNGLIHVPKDLSQKTTILNISQNYISELWTSDILSLSKLRILIISHNRIQYLDISVFKFNQELEYLDLSHNKLVKISCHPTVNLKHLDLSFNAFDALPICKEFGNMSQLKFLGLSTTHLEKSSVLPIAHLNISKVLLVLGETYGEKEDPEGLQDFNTESLHIVFPTNKEFHFILDVSVKTVANLELSNIKCVLEDNKCSYFLSILAKLQTNPKLSNLTLNNIETTWNSFIRILQLVWHTTVWYFSISNVKLQGQLDFRDFDYSGTSLKALSIHQVVSDVFGFPQSYIYEIFSNMNIKNFTVSGTRMVHMLCPSKISPFLHLDFSNNLLTDTVFENCGHLTELETLILQMNQLKELSKIAEMTTQMKSLQQLDISQNSVSYDEKKGDCSWTKSLLSLNMSSNILTDTIFRCLPPRIKVLDLHSNKIKSIPKQVVKLEALQELNVAFNSLTDLPGCGSFSSLSVLIIDHNSVSHPSADFFQSCQKMRSIKAGDNPFQCTCELGEFVKNIDQVSSEVLEGWPDSYKCDYPESYRGTLLKDFHMSELSCNITLLIVTIVATMLVLAVTVTSLCSYLDLPWYLRMVCQWTQTRRRARNIPLEELQRNLQFHAFISYSGHDSFWVKNELLPNLEKEGMQICLHERNFVPGKSIVENIITCIEKSYKSIFVLSPNFVQSEWCHYELYFAHHNLFHEGSNSLILILLEPIPQYSIPSSYHKLKSLMARRTYLEWPKEKSKRGLFWANLRAAINIKLTEQAKK

SEQ ID NO: 13277 - protein, 786 aa, Homo Sapiens; identical to SEQ ID NO: 13276

SEQ ID NO: 13278 - protein, 627 aa, Homo Sapiens
MLDLSYNNLNVVGNDSFAWLPQLEYFFLEYNNIQHLFSHSLHGLFNVRYLNLKRSFTKQSISLASLPKIDDFSFQWLKCLEHLNMEDNDIPGIKSNMFTGLINLKYLSLSNSFTSLRTLTNETFVSLAHSPLHILNLTKNKISKIESDAFSWLGHLEVLDLGLNEIGQELTGQEWRGLENIFEIYLSYNKYLQLTRNSFALVPSLQRLMLRRVALKNVDSSPSPFQPLRNLTILDLSNNNIANINDDMLEGLEKLEILDLQHNNLARLWKHANPGGPIYFLKGLSHLHILNLESNGFDEIPVEVFKDLFELKIIDLGLNNLNTLPASVFNNQVSLKSLNLQKNLITSVEKKVFGPAFRNLTELDMRFNPFDCTCESIAWFVNWINETHTNIPELSSHYLCNTPPHYHGFPVRLFDTSSCKDSAPFELFFMINTSILLIFIFIVLLIHFEGWRISFYWNVSVHRVLGFKEIDRQTEQFEYAAYIIHAYKDKDWVWEHFSSMEKEDQSLKFCLEERDFEAGVFELEAIVNSIKRSRKIIFVITHHLLKDPLCKRFKVHHAVQQAIEQNLDSIILVFLEEIPDYKLNHALCLRRGMFKSHCILNWPVQKERIGAFRHKLQVALGSKNSVH

SEQ ID NO: 13279 - protein, 904 aa, Homo Sapiens
MRQTLPCIYFWGGLLPFGMLCASSTTKCTVSHEVADCSHLKLTQVPDDLPTNITVLNLTHNQLRRLPAANFTRYSQLTSLDVGFNTISKLEPELCQKLPMLKVLNLQHNELSQLSDKTFAFCTNLTELHLMSNSIQKIKNNPFVKQKNLITLDLSHNGLSSTKLGTQVQLENLQELLLSNNKIQALKSEELDIFANSSLKKLELSSNQIKEFSPGCFHAIGRLFGLFLNNVQLGPSLTEKLCLELANTSIRNLSLSNSQLSTTSNTTFLGLKWTNLTMLDLSYNNLNVVGNDSFAWLPQLEYFFLEYNNIQHLFSHSLHGLFNVRYLNLKRSFTKQSISLASLPKIDDFSFQWLKCLEHLNMEDNDIPGIKSNMFTGLINLKYLSLSNSFTSLRTLTNETFVSLAHSPLHILNLTKNKISKIESDAFSWLGHLEVLDLGLNEIGQELTGQEWRGLENIFEIYLSYNKYLQLTRNSFALVPSLQRLMLRRVALKNVDSSPSPFQPLRNLTILDLSNNNIANINDDMLEGLEKLEILDLQHNNLARLWKHANPGGPIYFLKGLSHLHILNLESNGFDEIPVEVFKDLFELKIIDLGLNNLNTLPASVFNNQVSLKSLNLQKNLITSVEKKVFGPAFRNLTELDMRFNPFDCTCESIAWFVNWINETHTNIPELSSHYLCNTPPHYHGFPVRLFDTSSCKDSAPFELFFMINTSILLIFIFIVLLIHFEGWRISFYWNVSVHRVLGFKEIDRQTEQFEYAAYIIHAYKDKDWVWEHFSSMEKEDQSLKFCLEERDFEAGVFELEAIVNSIKRSRKIIFVITHHLLKDPLCKRFKVHHAVQQAIEQNLDSIILVFLEEIPDYKLNHALCLRRGMFKSHCILNWPVQKERIGAFRHKLQVALGSKNSVH

SEQ ID NO: 13280 - protein, 351 aa, Homo Sapiens
MRQTLPCIYFWGGLLPFGMLCASSTTKCTVSHEVADCSHLKLTQVPDDLPTNITVLNLTHNQLRRLPAANFTRYSQLTSLDVGFNTISKLEPELCQKLPMLKVLNLQHNELSQLSDKTFAFCTNLTELHLMSNSIQKIKNNPFVKQKNLITLDLSHNGLSSTKLGTQVQLENLQELLLSNNKIQALKSEELDIFANSSLKKLELSSNQIKEFSPGCFHAIGRLFGLFLNNVQLGPSLTEKLCLELANTSIRNLSLSNSQLSTTSNTTFLGLKWTNLTMLDLSYNNLNVWLKCLEHLNMEDNDIPGIKSNMFTGLINLKYLSLSNSFTSLRTLTNETFVSLAHSPLHILNLT

SEQ ID NO: 13281 - protein, 45 aa, Homo Sapiens
MKKCLLPVLITCMQTAICKDRMMMIMILLVNYRPDEFIECEDPVD

SEQ ID NO: 13282 - protein, 121 aa, Homo Sapiens
MKKCLLPVLITCMQTAICKDRMMMIMILLVNYRPDEFIECEDPVDHVGNATASQELGYGCLKFGGQAYSDVEHTSVQCHALDGIECASPRTFLRENKPCIKYTGHYFITTLLYSFFLGCFG

SEQ ID NO: 13283 - protein, 171 aa, Homo Sapiens
MKKCLLPVLITCMQTAICKDRMMMIMILLVNYRPDEFIECEDPVDHVGNATASQELGYGCLKFGGQAYSDVEHTSVQCHALDGIECASPRTFLRENKPCIKYTGHYFITTLLYSFFLGCFGVDRFCLGHTGTAVGKLLTLGGLGIWWFVDLILLITGGLMPSDGSNWCTVY

SEQ ID NO: 13284 - protein, 171 aa, Homo Sapiens; identical to SEQ ID NO: 13283

SEQ ID NO: 13285 - protein, 63 aa, Homo Sapiens
MKKCLLPVLITCMQTAICKDRMMMIMILLVNYRPDEFIECEDPVDHVGNATASQELGYGCLKV

SEQ ID NO: 13286 - protein, 214 aa, Homo Sapiens
MVLGGCPVSYLLLCGQAALLLGNLLLLHCVSRSHSQNATAEPELTSAGAAQPEGPGGAASWEYGDPHSPVILCSYLPDEFIECEDPVDHVGNATASQELGYGCLKFGGQAYSDVEHTSVQCHALDGIECASPRTFLRENKPCIKYTGHYFITTLLYSFFLGCFGVDRFCLGHTGTAVGKLLTLGGLGIWWFVDLILLITGGLMPSDGSNWCTVY

SEQ ID NO: 13287 - protein, 247 aa, Homo Sapiens
MAGGVLPLRGLRALCRVLLFLSQFCILSGGEQSQALAQSIKDPGPTRTFTVVPRAAESTEIPPYVMKCPSNGLCSRLPADCIDCTTNFSCTYGKPVTFDCAVKPSVTCVDQDFKSQKNFIINMTCRFCWQLPETDYECTNSTSCMTVSCPRQRYPANCTVRDHVHCLGNRTFPKMLYCNWTGGYKWSTALALSITLGGFGADRFYLGQWREGLGKLFSFGGLGIWTLIDVLLIGVGYVGPADGSLYI

SEQ ID NO: 13288 - protein, 209 aa, Homo Sapiens
MAGGVLPLRGLRALCRVLLFLSQFCILSGGEQSQALAQSIKDPGPTRTFTVVPRAAESTEIPPYVMKCPSNGLCSRLPADCIDCTTNFSCTYGKPVTFDCAVKPSVTCVDQDFKSQKNFIINMTCRFCWQLPETDYECTNSTSCMTVSCPRQRYPANCTVRDHVHCLGNRTFPKMLYCNWTGGYKWSTALALSLQAQVGLHVQLTVGLH

SEQ ID NO: 13289 - protein, 221 aa, Homo Sapiens
MAGGVLPLRGLRALCRVLLFLSQFCILSGGESTEIPPYVMKCPSNGLCSRLPADCIDCTTNFSCTYGKPVTFDCAVKPSVTCVDQDFKSQKNFIINMTCRFCWQLPETDYECTNSTSCMTVSCPRQRYPANCTVRDHVHCLGNRTFPKMLYCNWTGGYKWSTALALSITLGGFGADRFYLGQWREGLGKLFSFGGLGIWTLIDVLLIGVGYVGPADGSLYI

SEQ ID NO: 13290 - protein, 183 aa, Homo Sapiens
MAGGVLPLRGLRALCRVLLFLSQFCILSGGESTEIPPYVMKCPSNGLCSRLPADCIDCTTNFSCTYGKPVTFDCAVKPSVTCVDQDFKSQKNFIINMTCRFCWQLPETDYECTNSTSCMTVSCPRQRYPANCTVRDHVHCLGNRTFPKMLYCNWTGGYKWSTALALSLQAQVGLHVQLTVGLH

SEQ ID NO: 13291 - protein, 42 aa, Homo Sapiens
MAGGVLPLRGLRALCRVLLFLSQFCILSGGGESKAGFSAGWG

SEQ ID NO: 13292 - protein, 182 aa, Homo Sapiens
MKCPSNGLCSRLPADCIDCTTNFSCTYGKPVTFDCAVKPSVTCVDQDFKSQKNFIINMTCRFCWQLPETDYECTNSTSCMTVSCPRQRYPANCTVRDHVHCLGNRTFPKMLYCNWTGGYKWSTALALSITLGGFGADRFYLGQWREGLGKLFSFGGLGIWTLIDVLLIGVGYVGPADGSLYI

SEQ ID NO: 13293 - protein, 21 aa, Homo Sapiens
  misc_feature (1)..(1): Xaa can be any naturally occurring amino acid
XQFCILSGGGESKAGFSAGWG

SEQ ID NO: 13294 - protein, 161 aa, Homo Sapiens
  misc_feature (1)..(1): Xaa can be any naturally occurring amino acid
XSTEIPPYVMKCPSNGLCSRLPADCIDCTTNFSCTYGKPVTFDCAVKPSVTCVDQDFKSQKNFIINMTCRFCWQLPETDYECTNSTSCMTVSCPRQRYPANCTVRDHVHCLGNRTFPKMLYCNWTGGYKWSTALALRVGLFIDTVTTPLHSSLSHRARHCL

SEQ ID NO: 13295 - protein, 152 aa, Homo Sapiens
ETTIKFAPANLGYARGVDPPPCDAGTDQDSRWRLQYDVYQYFLPENDLTEEMLLKHLQRMVSVPQVKASALKVVTLTANDKTSVSFSSLPGQGVIYNVIVWDPFLNTSAAYIPAHTYACSFEAGEGSCASLAVLYLLLCLSTSSPSFITGLF

SEQ ID NO: 13296 - protein, 81 aa, Homo Sapiens
FYILITRLTPIKYDGNLKIFHDDGVFWVTFSCIAILIPVVFMGCLRILNILTCGVIGSYSVVLAIDSYWSTSLSYITLNVL

SEQ ID NO: 13297 - protein, 37 aa, Homo Sapiens
MAILLSYSERDPVPGGCNLEFDLDIDPNIYLEYNFFE

SEQ ID NO: 13298 - protein, 66 aa, Homo Sapiens
MAILLSYSERDPVPGGCNLEFDLDIDPNIYLEYNFFETTIKFAPANLGYARGVDPPPCDAGTDQDS

SEQ ID NO: 13299 - protein, 86 aa, Homo Sapiens
MAILLSYSERDPVPGGCNLEFDLDIDPNIYLEYNFFETTIKFAPANLGYARGVDPPPCDAGTDQDSRWRLQYDVYQYFLPENDLTE

SEQ ID NO: 13300 - protein, 129 aa, Homo Sapiens [sequence omitted]

SEQ ID NO: 13301 - protein, 49 aa, Homo Sapiens
MGFLQLLVVAVLASEHRVAGAAEVFGNSSEDSPFQFLGNRHCQWTGFHP

SEQ ID NO: 13302 - protein, 570 aa, Homo Sapiens
MGFLQLLVVAVLASEHRVAGAAEVFGNSSEGLIEFSVGKFRYFELNRPFPEEAILHDISSNVTFLIFQIHSQYQNTTVSFSPTLLSNSSETGTASGLVFILRPEQSTCTWYLGTSGIQPVQNMAILLSYSERDPVPGGCNLEFDLDIDPNIYLEYNFFETTIKFAPANLGYARGVDPPPCDAGTDQDSRWRLQYDVYQYFLPENDLTEEMLLKHLQRMVSVPQVKASALKVVTLTANDKTSVSFSSLPGQGVIYNVIVWDPFLNTSAAYIPAHTYACSFEAGEGSCASLGRVSSKVFFTLFALLGFFICFFGHRFWKTELFFIGFIIMGFFFYILITRLTPIKYDVNLILTAVTGSVGGMFLVAVWWRFGILSICMLCVGLVLGFLISSVTFFTPLGNLKIFHDDGVFWVTFSCIAILIPVVFMGCLRILNILTCGVIGSYSVVLAIDSYWSTSLSYITLNVLKRALNKDFHRAFTNVPFQTNDFIILAVWGMLAVSGITLQIRRERGRPFFPPHPYKLWKQERERRVTNILDPSYHIPPLRERLYGRLTQIKGLFQKEQPAGERTPLLL

SEQ ID NO: 13303 - protein, 116 aa, Homo Sapiens
MGFLQLLVVAVLASEHRVAGAAEVFGNSSEVYLVVGLIEFSVGKFRYFELNRPFPEEAILHDISSNVTFLIFQIHSQYQNTTVSFSPTLLSNSSETGTASGLVFILRPEQSTCTWY

SEQ ID NO: 13304 - protein, 136 aa, Homo Sapiens
MLLKHLQRMVSVPQVKASALKVVTLTANDKTSVSFSSLPGQGVIYNVIVWDPFLNTSAAYIPAHTYACSFEAGEGSCASLGRVSSKVFFTLFALLGFFICFFGHRFWKTELFFIGFIIMGFFFYILITRLTPIKYD

SEQ ID NO: 13305 - protein, 136 aa, Homo Sapiens; identical to SEQ ID NO: 13304

SEQ ID NO: 13306 - protein, 115 aa, Homo Sapiens
MSHRARPISGLIEFSVGKFRYFELNRPFPEEAILHDISSNVTFLIFQIHSQYQNTTVSFSPTLLSNSSETGTASGLVFILRPEQSTCTWYLGTSGIQPVQNMAILLSYSERDPVP

SEQ ID NO: 13307 - protein, 222 aa, Homo Sapiens
VWDPFLNTSAAYIPAHTYACSFEAGEGSCASLELFFIGFIIMGFFFYILITRLTPIKYDVNLILTAVTGSVGGMFLVAVWWRFGILSICMLCVGLVLGFLISSVTFFTPLGNLKIFHDDGVFWVTFSCIAILIPVVFMGCLRILNILTCGVIGSYSVVLAIDSYWSTSLSYITLNVLKRALNKDFHRAFTNVPFQTNDFIILAVWGMLAVSGITLQIRRERG

SEQ ID NO: 13308 - protein, 200 aa, Homo Sapiens
  misc_feature (1)..(1): Xaa can be any naturally occurring amino acid
XLLKHLQRMVSVPQVKASALKVVTLTANDKTSVSFSSLPGQGVIYNVIVWDPFLNTSAAYIPAHTYACSFEAGEGSCASLGRVSSKVFFTLFALLGFFICFFGHRFWKTELFFIGFIIMGFFFYILITRLTPIKYDVNLILTAVTGSVGGMFLVAVWWRFGILSICMLCVGLVLGFLISSVTFFTPLETGSLSVTHAGLQ

SEQ ID NO: 13309 - protein, 144 aa, Homo Sapiens
  misc_feature (1)..(1): Xaa can be any naturally occurring amino acid
XVPQVKASALKVVTLTANDKTSVSFSSLPGQGVIYNVIVWDPFLNTSAAYIPAHTYACSFEAGEGSCASLGRVSSKVFFTLFALLGFFICFFGHRFWKTELFFIGFIIMGFFFYILITRLTPIKYDAEHTDLWSHWLLFGGFSH

SEQ ID NO: 13310 - protein, 208 aa, Homo Sapiens
MAESLYEIRFRENVEKRILCHMQLSSAQVEQLRQAIEELYYFEFVVDDLPIRGFVGYMEESGFLPHSHKIGLWTHLDFHLEFHGDRIIFANVSVRDVKPHSLDGLRPDEFLGLTHTYSVRWSETSVERRSDRRRGDDGGFFPRTLEIHWLSIINSMVLVFLLVGFVAVILMRVLRNDLARYNLDEETTSAGSGDDFDQGDNGWKIIHT

SEQ ID NO: 13311 - protein, 519 aa, Homo Sapiens
MAESLYEIRFRENVEKRILCHMQLSSAQVEQLRQAIEELYYFEFVVDDLPIRGFVGYMEESGFLPHSHKIGLWTHLDFHLEFHGDRIIFANVSVRDVKPHSLDGLRPDEFLGLTHTYSVRWSETSVERRSDRRRGDDGGFFPRTLEIHWLSIINSMVLVFLLVGFVAVILMRVLRNDLARYNLDEETTSAGSGDDFDQGDNGWKIIHTDVFRFPPYRGLLCAVLGVGAQFLALGTGIIVMALLGMFNVHRHGAINSAAILLYALTCCISGYVSSHFYRQIGGERWVWNIILTTSLFSVPFFLTWSVVNSVHWANGSTQALPATTILLLLTVWLLVGFPLTVIGGIFGKNNASPFDAPCRTKNIAREIPPQPWYKSTVIHMTVGGFLPFSAISVELYYIFATVWGREQYTLYGILFFVFAILLSVGACISIALTYFQLSGEDYRWWWRSVLSVGSTGLFIFLYSVFYYARRSNMSGAVQTVEFFGYSLLTGYVFFLMLGTISFFSSLKFIRYIYVNLKMD

SEQ ID NO: 13312 - protein, 133 aa, Homo Sapiens
MTVVGNPRSWSCQWLPILILLLGTALVQVYCHPHDCWRLPAFQCHLCGAVLHLCHSMGSGAVHFVRHPLLCLRHPAECGGLHLHCTHLLPVVWGGLPLVVAICAECWLHRPLHLPLLSFLLCPALQHVWGSTD

SEQ ID NO: 13313 - protein, 210 aa, Homo Sapiens
MTVVGNPRSWSCQWLPILILLLGTGHGPGVEGVTHYKAGDPVILYVNKVGPYHNPQETYHYYQLPVCCPEKIRHKSLSLGEVLDGDRMAESLYEIRFRENVEKRILCHMQLSSAQVEQLRQAIEELYYFEFVVDDLPIRGFVGYMEESGFLPHSHKIGLWTHLDFHLEFHGDRIIFANVSVRDVKPHSLDGLRPDEFLGLTHTYSVRWSE

SEQ ID NO: 13314 - protein, 242 aa, Homo Sapiens
MTVVGNPRSWSCQWLPILILLLGTGHGPGVEGVTHYKAGDPVILYVNKVGPYHNPQETYHYYQLPVCCPEKIRHKSLSLGEVLDGDRMAESLYEIRFRENVEKRILCHMQLSSAQVEQLRQAIEELYYFEFVVDDLPIRGFVGYMEESGFLPHSHKIGLWTHLDFHLEFHGDRIIFANVSVRDVKPHSLDGLRPDEFLGLTHTYSVRWSETSVERRSDRRRGDDGGFFPRTLEIHWLSIINS

SEQ ID NO: 13315 - protein, 606 aa, Homo Sapiens
MTVVGNPRSWSCQWLPILILLLGTGHGPGVEGVTHYKAGDPVILYVNKVGPYHNPQETYHYYQLPVCCPEKIRHKSLSLGEVLDGDRMAESLYEIRFRENVEKRILCHMQLSSAQVEQLRQAIEELYYFEFVVDDLPIRGFVGYMEESGFLPHSHKIGLWTHLDFHLEFHGDRIIFANVSVRDVKPHSLDGLRPDEFLGLTHTYSVRWSETSVERRSDRRRGDDGGFFPRTLEIHWLSIINSMVLVFLLVGFVAVILMRVLRNDLARYNLDEETTSAGSGDDFDQGDNGWKIIHTDVFRFPPYRGLLCAVLGVGAQFLALGTGIIVMALLGMFNVHRHGAINSAAILLYALTCCISGYVSSHFYRQIGGERWVWNIILTTSLFSVPFFLTWSVVNSVHWANGSTQALPATTILLLLTVWLLVGFPLTVIGGIFGKNNASPFDAPCRTKNIAREIPPQPWYKSTVIHMTVGGFLPFSAISVELYYIFATVWGREQYTLYGILFFVFAILLSVGACISIALTYFQLSGEDYRWWWRSVLSVGSTGLFIFLYSVFYYARRSNMSGAVQTVEFFGYSLLTGYVFFLMLGTISFFSSLKFIRYIYVNLKMD

SEQ ID NO: 13316 - protein, 489 aa, Homo Sapiens
MTVVGNPRSWSCQWLPILILLLGTGHGPGVEGVTHYKAGDPVILYVNKVGPYHNPQETYHYYQLPVCCPEKIRHKSLSLGEVLDGDRMAESLYEIRFRENVEKRILCHMQLSSAQVEQLRQAIEELYYFEFVVDDLPIRGFVGYMEESGFLPHSHKIGLWTHLDFHLEFHGDRIIFANVSVRDVKPHSLDGLRPDEFLGLTHTYSVRWSETSVERRSDRRRGDDGGFFPRTLEIHWLSIINSMVLVFLLVGFVAVILMRVLRNDLARYNLDEETTSAGSGDDFDQGDNGWKIIHTDVFRFPPYRGLLCAVLGVGAQFLALGTGIIVMALLGMFNVHRHGAINSAAILLYALTCCISGYVSSHFYRQIGGERWVWNIILTTSLFSVPFFLTWSVVNSVHWANGSTQALPATTILLLLTVWLLVGFPLTVIGGIFGKNNASPFDAPCRTKNIAREIPPQPWYKSTVIHMTVGGFLPFRYPPFIPWLLLSGS

SEQ ID NO: 13317 - protein, 257 aa, Homo Sapiens
MTVVGNPRSWSCQWLPILILLLGTGHGPGVEGVTHYKAGDPVILYVNKVGPYHNPQETYHYYQLPVCCPEKIRHKSLSLGEVLDGDRMAESLYEIRFRENVEKRILCHMQLSSAQVEQLRQAIEELYYFEFVVDDLPIRGFVGYMEESGFLPHSHKIGLWTHLDFHLEFHGDRIIFANVSVRDVKPHSLDGLRPDEFLGLTHTYSVRWSETSVERRSDRRRGDDGGFFPRTLEIHWLSIINSMVLVFLLVGFVAVIL

SEQ ID NO: 13318 - protein, 420 aa, Homo Sapiens
MTVVGNPRSWSCQWLPILILLLGTGHGPGVEGVTHYKAGDPVILYVNKVGPYHNPQETYHYYQLPVCCPEKIRHKSLSLGEVLDGDRMAESLYEIRFRENVEKRILCHMQLSSAQVEQLRQAIEELYYFEFVVDDLPIRGFVGYMEESGFLPHSHKIGLWTHLDFHLEFHGDRIIFANVSVRDVKPHSLDGLRPDEFLGLTHTYSVRWSETSVERRSDRRRGDDGGFFPRTLEIHWLSIINSMVLVFLLVGFVAVILMRVLRNDLARYNLDEETTSAGSGDDFDQGDNGWKIIHTDVFRFPPYRGLLCAVLGVGAQFLALGTGIIVMALLGMFNVHRHGAINSAAILLYALTCCISGYVSSHFYRQIGGERWVWNIILTTSLFSGSASHNHPAASDGLAAGGLSPHCHWRHLWEEQRQPL

SEQ ID NO: 13319 - protein, 589 aa, Homo Sapiens
MTVVGNPRSWSCQWLPILILLLGTGHGPGVEGVTHYKAGDPVILYVNKVGPYHNPQETYHYYQLPVCCPEKIRHKSLSLGEVLDGDRMAESLYEIRFRENVEKRILCHMQLSSAQVEQLRQAIEELYYFEFVVDDLPIRGFVGYMEESGFLPHSHKIGLWTHLDFHLEFHGDRIIFANVSVRDVKPHSLDGLRPDEFLGLTHTYSVRWSETSVERRSDRRRGDDGGFFPRTLEIHWLSIINSMVLVFLLVGFVAVILMRVLRNDLARYNLDEETTSAGSGDDFDQGDNGWKIIHTDVFRFPPYRGLLCAVLGVGAQFLALGTGIIVMALLGMFNVHRHGAINSAAILLYALTCCISGYVSSHFYRQIGGERWVWNIILTTSLFSVPFFLTWSVVNSVHWANGSTQALPATTILLLLTVWLLVGFPLTVIGGIFGKNNASPFDAPCRTKNIAREIPPQPCAISVELYYIFATVWGREQYTLYGILFFVFAILLSVGACISIALTYFQLSGEDYRWWWRSVLSVGSTGLFIFLYSVFYYARRSNMSGAVQTVEFFGYSLLTGYVFFLMLGTISFFSSLKFIRYIYVNLKMD

SEQ ID NO: 13320 - protein, 301 aa, Homo Sapiens
MTVVGNPRSWSCQWLPILILLLGTGHGPGVEGVTHYKAGDPVILYVNKVGPYHNPQETYHYYQLPVCCPEKIRHKSLSLGEVLDGDRMAESLYEIRFRENVEKRILCHMQLSSAQVEQLRQAIEELYYFEFVVDDLPIRGFVGYMEESGFLPHSHKIGLWTHLDFHLEFHGDRIIFANVSVRDVKPHSLDGLRPDEFLGLTHTYSVRWSETSVERRSDRRRGDDGGFFPRTLEIHWLSIINSMVLVFLLVGFVAVILMRVLRNDLARYNLDEETTSAGSGDDFDQGDNGWKIIHTDVFRFP

SEQ ID NO: 13321 - protein, 57 aa, Homo Sapiens
MRTLVGLLTSNQALLQLEAARCLHELSHSEQSTVAEACLPATSYLLTYLSSHSSDFI

SEQ ID NO: 13322 - protein, 499 aa, Homo Sapiens
MWSRRQGRLRPTVCGVEELRRRRREREAALRKARREQQLVSKRLLRNDAPEEAGEGCVAAILGETEVQQFLRQAQRGTEEKEREGALVSLRRGLQHPETQQTFIRLEGSMRTLVGLLTSNQALLQLEAARCLHELSHSEQSTVAEACLPATSYLLTYLSSHSSDFIELCLYTLGNLIVESEAVRRQLLPQGIVPALAACIQSPHVAVLEALGYALSQLLQAEEAPEKIIPPASASSSILASTLPQHMLQMLQPGPKLNPGVAVEFAWCLHYIICSQVSNPLLIGHGALSTLGLLLLDLAGAVQKTEDAGLELLACPVLRCLSNLLTEAAVETVGGQMQLRDERVVAALFILLQFFFQKQPSLLPEGLWLLNNLTANSPSFCTSLLSLDLIEPLLQLLPVSNVVSVMVLTVLCNVAEKGPAYCQRLWPGPLLPALLHTLAFSDTEVVGQSLELLHLLFLYQPEAVQVFLQQSGLQALERHQEEAQLQDRVYALQQTALQG

SEQ ID NO: 13323 - protein, 493 aa, Homo Sapiens
MWSRRQGRLRPTVCGVEELRRRRREREAALRKARREQQLVSKRLLRNDAPEEAGEGCVAAILGETEVQQFLRQAQRGTEEKEREGALVSLRRGLQHPETQQTFIRLEGSMRTLVGLLTSNQALLQLEAARCLHELSHSEQSTVAEACLPATSYLLTYLSSHSSDFIELCLYTLGNLIVESEAVRRQLLPQGIVPALAACIQSPHVAVLEALGYALSQLLQAEEAPEKIIPSILASTLPQHMLQMLQPGPKLNPGVAVEFAWCLHYIICSQVSNPLLIGHGALSTLGLLLLDLAGAVQKTEDAGLELLACPVLRCLSNLLTEAAVETVGGQMQLRDERVVAALFILLQFFFQKQPSLLPEGLWLLNNLTANSPSFCTSLLSLDLIEPLLQLLPVSNVVSVMVLTVLCNVAEKGPAYCQRLWPGPLLPALLHTLAFSDTEVVGQSLELLHLLFLYQPEAVQVFLQQSGLQALERHQEEAQLQDRVYALQQTALQG

SEQ ID NO: 13324 - protein, 101 aa, Homo Sapiens
MWSRRQGRLRPTVCGVEELRRRRREREAALRKARREQQLVSKRLLRNDAPEEAGEGCVAAILGETEVRGQGAAVPAASPAGDRGKGERGGSGQPSSRLAAP

SEQ ID NO: 13325 - protein, 43 aa, Homo Sapiens
MWSRRQGRLRPTVCGVEELRRRRREREHCGRRGGSSSWSARGC

SEQ ID NO: 13326 - protein, 43 aa, Homo Sapiens; identical to SEQ ID NO: 13325

SEQ ID NO: 13327 - protein, 43 aa, Homo Sapiens; identical to SEQ ID NO: 13325

SEQ ID NO: 13328 - protein, 43 aa, Homo Sapiens; identical to SEQ ID NO: 13325

SEQ ID NO: 13329 - protein, 82 aa, Homo Sapiens
MLDVKMEDIKESIETMRTRLERSIQMLTLLRAFEARDRNLQEGNLERVNFWSAVNVAVLLLVAVLQVCTLKRFFQDKRPVPT

SEQ ID NO: 13330 - protein, 74 aa, Homo Sapiens
MMAAGAALALALWLLMPPVEVGGAGPPPIQDGEFTFLLPAGRKQCFYQSAPANASLETEYQGGANGGRGLQAVL

SEQ ID NO: 13331 - protein, 95 aa, Homo Sapiens
MMAAGAALALALWLLMPPVEVGGAGPPPIQDGEFTFLLPAGRKQCFYQSAPANASLETEYQVIGGAGLDVDFTLESPQGVLLGGANGGRGLQAVL

SEQ ID NO: 13332 - protein, 185 aa, Homo Sapiens
MMAAGAALALALWLLMPPVEVGGAGPPPIQDGEFTFLLPAGRKQCFYQSAPANASLETEYQVIGGAGLDVDFTLESPQGVLLVSESRKADGVHTSPLRPCGPGWSAASRCSRYCGPSRHVTATCKRATWSGSTSGQLSTWRCCCWWLCCRSARSSASSRTSARCPRSPCHGRKNGTKEGQQGVCI

SEQ ID NO: 13333 - protein, 191 aa, Homo Sapiens
MMAAGAALALALWLLMPPVEVGGAGPPPIQDGEFTFLLPAGRKQCFYQSAPANASLETEYQVIGGAGLDVDFTLESPQGVLLVSESRKADGVHTTISEKLVFFELIFDSLQDDEEVEGWAEAVEPEEMLDVKMEDIKESIETMRTRLERSIQMLTLLRAFEARDRNLQEGNLERVNFWSAVNVAVLLLVAV

SEQ ID NO: 13334 - protein, 227 aa, Homo Sapiens
MMAAGAALALALWLLMPPVEVGGAGPPPIQDGEFTFLLPAGRKQCFYQSAPANASLETEYQVIGGAGLDVDFTLESPQGVLLVSESRKADGVHTVEPTEAGDYKLCFDNSFSTISEKLVFFELIFDSLQDDEEVEGWAEAVEPEEMLDVKMEDIKESIETMRTRLERSIQMLTLLRAFEARDRNLQEGNLERVNFWSAVNVAVLLLVAVLQVCTLKRFFQDKRPVPT

SEQ ID NO: 13335 - protein, 65 aa, Homo Sapiens
  misc_feature (1)..(1): Xaa can be any naturally occurring amino acid
XEVEGWAEAVEPEEMLDVKMEDIKVCPGCAGATPSRSLGFTWGAPLGLTQPPLRSCALQLNYRVH

SEQ ID NO: 13336 - protein, 116 aa, Homo Sapiens
MDGTYKFCFSNRMSTMTPKIVMFTIDIGEAPKGQDMETEAHQNKLEEMINELAVAMTAVKHEQEYMEVRERIHRAINDNTNSRVVLWSFFEALVLVAMTLGQIYYLKRFFEVRRVV

SEQ ID NO: 13337 - protein, 201 aa, Homo Sapiens
MVTLAELLVLLAALLATVSGYFVSIDAHAEECFFERVTSGTKMGLIFEVAEGGFLDIDVEITGPDNKGIYKGDRESSGKYTFAAHMDGTYKFCFSNRMSTMTPKIVMFTIDIGEAPKGQDMETEAHQNKLEEMINELAVAMTAVKHEQEYMEVRERIHRAINDNTNSRVVLWSFFEALVLVAMTLGQIYYLKRFFEVRRVV

SEQ ID NO: 13338 - protein, 166 aa, Homo Sapiens
MVTLAELLVLLAALLATVSGYFVSIDAHAEECFFERVTSGTKMGLIFEVAEGGFLDIDVEITGPDNKGIYKGDRESSGKYTFAAHMDGTYKFCFSNRMSTMTPKIVMFTIDIGEAPKGQDMETEGGGDTWDAHQNKLEEMINELAVAMTAVKHEQEYMEVRERIHR

SEQ ID NO: 13339 - protein, 146 aa, Homo Sapiens
MGSTVPRSASVLLLLLLLRRAEQPCGAELTFELPDNAKQCFHEEVEQGVKFSLDYQVITGGHYDVDCYVEDPQGNTIYRETKKQYDSFTYRAEVKGVYQFCFSNEFSTFSHKTVYFDFQVGDEPPILPDMGNRVTALTQGFRVFCL

SEQ ID NO: 13340 - protein, 155 aa, Homo Sapiens
MGSTVPRSASVLLLLLLLRRAEQPCGAELTFELPDNAKQCFHEEVEQGVKFSLDYQVITGGHYDVDCYVEDPQGNTIYRETKKQYDSFTYRAEVKGVYQFCFSNEFSTFSHKTVYFDFQVGDEPPILPDMGNRVTALTQGPSASPTPTPPLRVPV

SEQ ID NO: 13341 - protein, 217 aa, Homo Sapiens
MGSTVPRSASVLLLLLLLRRAEQPCGAELTFELPDNAKQCFHEEVEQGVKFSLDYQVITGGHYDVDCYVEDPQGNTIYRETKKQYDSFTYRAEVKGVYQFCFSNEFSTFSHKTVYFDFQVGDEPPILPDMGNRVTALTQMESACVTIHEALKTVIDSQTHYRLREAQDRARAEDLNSRVSYWSVGETIALFVVSFSQVLLLKSFFTEKRPISRAVHS

SEQ ID NO: 13342 - protein, 173 aa, Homo Sapiens
MGSTVPRSASVLLLLLLLRRAEQPCGAELTFELPDNAKQCFHEEVEQGVKFSLDYQVITGGHYDVDCYVEDPQGNTIYRETKKQYDSFTYRAEVKGVYQFCFSNEFSTFSHKTVYFDFQVGDEPPILPDMGNRVTALTQRFRGAYWKEVDKMVDYMQPGGTPATEGLGRLAPS

SEQ ID NO: 13343 - protein, 186 aa, Homo Sapiens
MAGVGAGPLRAMGRQALLLLALCATGAQGLYFHIGETEKRCFIEEIPDETMVIGNYRTQMWDKQKEVFLPSTPGLGMHVEVKDPDGKVVLSRQYGSEGRFTFTSHTPGDHQICLHSNSTRMALFAGGKLRVHLDIQVGEHANNYPEIAAKDKLTELQLRARQLLDQVEQIQKEQDYQRASAYLLVI

SEQ ID NO: 13344 - protein, 227 aa, Homo Sapiens
MAGVGAGPLRAMGRQALLLLALCATGAQGLYFHIGETEKRCFIEEIPDETMVIGNYRTQMWDKQKEVFLPSTPGLGMHVEVKDPDGKVVLSRQYGSEGRFTFTSHTPGDHQICLHSNSTRMALFAGGKLRVHLDIQVGEHANNYPEIAAKDKLTELQLRARQLLDQVEQIQKEQDYQRYREERFRLTSESTNQRVLWWSIAQTVILILTGIWQMRHLKSFFEAKKLV

SEQ ID NO: 13345 - protein, 178 aa, Homo Sapiens
MAGVGAGPLRAMGRQALLLLALCATGAQGLYFHIGETEKRCFIEEIPDETMVIGNYRTQMWDKQKEVFLPSTPGLGMHVEVKDPDGKVVLSRQYGSEGRFTFTSHTPGDHQICLHSNSTRMALFAGGKLYREERFRLTSESTNQRVLWWSIAQTVILILTGIWQMRHLKSFFEAKKLV

SEQ ID NO: 13346 - protein, 120 aa, Homo Sapiens
MGDKIWLPFPVLLLAALPPVLLPGAAGFTPSLDSDFTFTLPAGQKECFYQPMPLKASLEIEYQVLDGAGLDIDFHLASPEGKTLVFEQRKSDGVHTCIRSKNGPGTAVHAYNPSTFRGQV

SEQ ID NO: 13347 - protein, 193 aa, Homo Sapiens
MGDKIWLPFPVLLLAALPPVLLPGAAGFTPSLDSDFTFTLPAGQKECFYQPMPLKASLEIEYQVLDGAGLDIDFHLASPEGKTLVFEQRKSDGVHTVETEVGDYMFCFDNTFSTISEKVIFFELILDNMGEQAQEQEDWKKYITGTDILDMKLEDILDPIIKIASDVQIRLHLGIHQQHQVQTKQKWAHTNSA

SEQ ID NO: 13348 - protein, 229 aa, Homo Sapiens
MGDKIWLPFPVLLLAALPPVLLPGAAGFTPSLDSDFTFTLPAGQKECFYQPMPLKASLEIEYQVLDGAGLDIDFHLASPEGKTLVFEQRKSDGVHTVETEVGDYMFCFDNTFSTISEKVIFFELILDNMGEQAQEQEDWKKYITGTDILDMKLEDILESINSIKSRLSKSGHIQTLLRAFEARDRNIQESNFDRVNFWSMVNLVVMVVVSAIQVYMLKSLFEDKRKSRT

SEQ ID NO: 13349 - protein, 162 aa, Homo Sapiens
MGDKIWLPFPVLLLAALPPVLLPGAAGFTPSLDSDFTFTLPAGQKECFYQPMPLKASLEIEYQVLDGAGLDIDFHLASPEGKTLVFEQRKSDGVHTVETEVGDYMFCFDNTFSTISEKVIFFELILDNMGEQAQEQEDWKKYITGTDILDMKLEDILVSMVF

SEQ ID NO: 13350 - protein, 82 aa, Homo Sapiens
MPRPGSAQRWAAVAGRWGCRLLALLLLVPGPGGASEITFELPDNAKQCFYEDIAQGTKCTLEFQVITGGHYDVDCRLEDPDG

SEQ ID NO: 13351 - protein, 224 aa, Homo Sapiens
MPRPGSAQRWAAVAGRWGCRLLALLLLVPGPGGASEITFELPDNAKQCFYEDIAQGTKCTLEFQVITGGHYDVDCRLEDPDGKVLYKEMKKQYDSFTFTASKNGTYKFCFSNEFSTFTHKTVYFDFQVGEDPPLFPSENRVSALTQMESACVSIHEALKSVIDYQTHFRLREAQGRSRAEDLNTRVAYWSVGEALILLVVSIGQVFLLKSFFSDKRTTTTRVGS

SEQ ID NO: 13352 - protein, 188 aa, Homo Sapiens
MPRPGSAQRWAAVAGRWGCRLLALLLLVPGPGGASEITFELPDNAKQCFYEDIAQGTKCTLEFQVITGGHYDVDCRLEDPDGKVLYKEMKKQYDSFTFTASKNGTYKFCFSNEFSTFTHKTVYFDFQVGEDPPLFPSENRVSALTQMESACVSIHEALKSVIDYQTHFRLREAQGRSRAEDLNTRVAY

SEQ ID NO: 13353 - protein, 404 aa, Homo Sapiens
MPRPGSAQRWAAVAGRWGCRLLALLLLVPGPGGASEITFELPDNAKQCFYEDIAQGTKCTLEFQVITGGHYDVDCRLEDPDGKVLYKEMKKQYDSFTFTASKNGTYKFCFSNEFSTFTHKTVYFDFQVGEDPPLFPSENRVSALTQMESACVSIHEALKSVIDYQTHFRLREAQGRSRAEDLNTRVAYWHSVDTSPGYHESDSKKSEDLSLCNVAEHSNTTEGPTGKQEGAQSVEEMFEEEAEEEVFLKFVILHAEDDTDEALRVQNLLQDDFGIKPGIIFAEMPCGRQHLQNLDDAVNGSAWTILLLTENFLRDTWCNFQFYTSLMNSVNRQHKYNSVIPMRPLNNPLPRERTPFALQTINALEEESRGFPTQVERIFQESVYKTQQTIWKETRNMVQRQFIA

SEQ ID NO: 13354 - protein, 72 aa, Homo Sapiens
MKRSLQALYCQLLSFLLILALTEALAFAIQEPSPRESLQVLPSGTPPGTMVTAPHSSTRHTSVVMLTPNPDG

SEQ ID NO: 13355 - protein, 149 aa, Homo Sapiens
MKRSLQALYCQLLSFLLILALTEALAFAIQEPSPRESLQVLPSGTPPGTMVTAPHSSTRHTSVVMLTPNPDGPPSQAAAPMATPTPRAEGHPPTHTISTIAATVTAPHSESSLSTGPAPAAMATTSSKPEGRPRGQAAPTILLTKPPGA

SEQ ID NO: 13356 - protein, 153 aa, Homo Sapiens
MKRSLQALYCQLLSFLLILALTEALAFAIQEPSPRESLQVLPSGTPPGTMVTAPHSSTRHTSVVMLTPNPDGPPSQAAAPMATPTPRAEGHPPTHTISTIAATVTAPHSESSLSTGPAPAAMATTSSKPEGRPRGQAAPTILLTKPPGATSRP

SEQ ID NO: 13357 - protein, 575 aa, Homo Sapiens
MKRSLQALYCQLLSFLLILALTEALAFAIQEPSPRESLQVLPSGTPPGTMVTAPHSSTRHTSVVMLTPNPDGPPSQAAAPMATPTPRAEGHPPTHTISTIAATVTAPHSESSLSTGPAPAAMATTSSKPEGRPRGQAAPTILLTKPPGATSRPTTAPPRTTTRRPPRPPGSSRKGAGNSSRPVPPAPGGHSRSKEGQRGRNPSSTPLGQKRPLGKIFQIYKGNFTGSVEPEPSTLTPRTPLWGYSSSPQPQTVAATTVPSNTSWAPTTTSLGPAKDKPGLRRAAQGGGSTFTSQGGTPDATAASGAPVSPQAAPVPSQRPHHGDPQDGPSHSDSWLTVTPGTSRPLSTSSGVFTAATGPTPAAFDTSVSAPSQGIPQGASTTPQAPTHPSRVSESTISGAKEETVATLTMTDRVPSPLSTVVSTATGNFLNRLVPAGTWKPGTAGNISHVAEGDKPQHRATICLSKMDIAWVILAISVPISSCSVLLTVCCMKRKKKTANPENNLSYWNNTITMDYFNRHAVELPREIQSLETSEDQLSEPRSPANGDYRDTGMVLVNPFCQETLFVGNDQVSEI

SEQ ID NO: 13358 - protein, 575 aa, Homo Sapiens; identical to SEQ ID NO: 13357

SEQ ID NO: 13359 - protein, 488 aa, Homo Sapiens
MKRSLQALYCQLLSFLLILALTEALAFAIQEPSPRESLQVLPSGTPPGTMVTAPHSSTRHTSVVMLTPNPDGPPSQAAAPMATPTPRAEGHPPTHTISTIAATVTAPHSESSLSTGPAPAAMATTSSKPEGRPRGQAAPTILLTKPPGATSRPTTAPPRTTTRRPPRPPGSSRKGAGNSSRPVPPAPGGHSRSKEGQRGRNPSSTPLGQKRPLGKIFQIYKGNFTGSVEPEPSTLTPRTPLWGYSSSPQPQTVAATTVPSNTSWAPTTTSLGPAKDKPGLRRAAQGGGSTFTSQGGTPDATAASGAPVSPQAAPVPSQRPHHGDPQDGPSHSDSWLTVTPGTSRPLSTSSGVFTAATGPTPAAFDTSVSAPSQGIPQGASTTPQAPTHPSRVSESTISGAKEETVATLTMTDRVPSPLSTVVSTATGNFLNRLVPAGTWKPGTAGNISHVAEGDKPQHRATICLSKMDIAWVILAISVPISSCSDPIT

SEQ ID NO: 13360 - protein, 105 aa, Homo Sapiens
MKRSLQALYCQLLTVLLTVCCMKRKKKTANPENNLSYWNNTITMDYFNRHAVELPREIQSLETSEDQLSEPRSPANGDYRDTGMVLVNPFCQETLFVGNDQVSEI

SEQ ID NO: 13361 - protein, 89 aa, Homo Sapiens
MVTAPHSSTRHTSVVMLTPNPDGPPSQAAAPMATPTPRAEGHPPTHTISTIAATVTAPHSESSLSTGPAPAAMATTSSKPEGRPRGQAA

SEQ ID NO: 13362 - protein, 122 aa, Homo Sapiens
MVTAPHSSTRHTSVVMLTPNPDGPPSQAAAPMATPTPRAEGHPPTHTISTIAATVTAPHSESSLSTGPAPAAMATTSSKPEGRPRGQAAPTILLTKPPGATSRPTTAPPRTTTRRPPRPPGS

SEQ ID NO: 13363 - protein, 51 aa, Homo Sapiens
MATLSVIGSSSLIAYAVFHNIQKSPEIRPLFYLSFCDLLLGLCWLTETLLY

SEQ ID NO: 13364 - protein, 80 aa, Homo Sapiens
MATLSVIGSSSLIAYAVFHNIQKSPEIRPLFYLSFCDLLLGLCWLTETLLYGASVANKDIICYNLQAVGQFWRLEGPRLR

SEQ ID NO: 13365 - protein, 80 aa, Homo Sapiens; identical to SEQ ID NO: 13364

SEQ ID NO: 13366 - protein, 85 aa, Homo Sapiens
MATLSVIGSSSLIAYAVFHNIQKSPEIRPLFYLSFCDLLLGLCWLTETLLYGASVANKDIICYNLQAVGQGRRGFAMFARLVLNA

SEQ ID NO: 13367 - protein, 106 aa, Homo Sapiens
MATLSVIGSSSLIAYAVFHNIQKSPEIRPLFYLSFCDLLLGLCWLTETLLYGASVANKDIICYNLQAVGQIFYISSFLYTVNYIWYLYTELRMKHTQSGQSTSPLV

SEQ ID NO: 13368 - protein, 175 aa, Homo Sapiens
MATLSVIGSSSLIAYAVFHNIQKSPEIRPLFYLSFCDLLLGLCWLTETLLYGASVANKDIICYNLQAVGQIFYISSFLYTVNYIWYLYTELRMKHTQSGQSTSPLVIDYTCRVCQMAFVFSSLIPLLLMTPVFCLGNTSECFQNFSQSHKCILMHSPPSAMAELPPSANTSVCST

SEQ ID NO: 13369 - protein, 337 aa, Homo Sapiens
MATLSVIGSSSLIAYAVFHNIQKSPEIRPLFYLSFCDLLLGLCWLTETLLYGASVANKDIICYNLQAVGQIFYISSFLYTVNYIWYLYTELRMKHTQSGQSTSPLVIDYTCRVCQMAFVFSSLIPLLLMTPVFCLGNTSECFQNFSQSHKCILMHSPPSAMAELPPSANTSVCSTLYFYGIAIFLGSFVLSLLTIMVLLIRAQTLYKKFVKSTGFLGSEQWAVIHIVDQRVRFYPVAFFCCWGPAVILMIIKLTKPQDTKLHMALYVLQALTATSQGLLNCGVYGWTQHKFHQLKQEARRDADTQTPLLCSQKRFYSRGLNSLESTLTFPASTSTIF

SEQ ID NO: 13370 - protein, 302 aa, Homo Sapiens
MATLSVIGSSSLIAYAVFHNIQKSPEIRPLFYLSFCDLLLGLCWLTETLLYGASVANKDIICYNLQAVGQVIDYTCRVCQMAFVFSSLIPLLLMTPVFCLGNTSECFQNFSQSHKCILMHSPPSAMAELPPSANTSVCSTLYFYGIAIFLGSFVLSLLTIMVLLIRAQTLYKKFVKSTGFLGSEQWAVIHIVDQRVRFYPVAFFCCWGPAVILMIIKLTKPQDTKLHMALYVLQALTATSQGLLNCGVYGWTQHKFHQLKQEARRDADTQTPLLCSQKRFYSRGLNSLESTLTFPASTSTIF

SEQ ID NO: 13371 - protein, 74 aa, Homo Sapiens
MATLSVIGSSSLIAYAVFHNIQKSPEIRPLFYLSFCDLLLGLCWLTETLLYGASVANKDIICYNLQAVGQVSAT

SEQ ID NO: 13372 - protein, 151 aa, Homo Sapiens
MFPKLQSEPQVLLIRAQTLYKKFVKSTGFLGSEQWAVIHIVDQRVRFYPVAFFCCWGPAVILMIIKLTKPQDTKLHMALYVLQALTATSQGLLNCGVYGWTQHKFHQLKQEARRDADTQTPLLCSQKRFYSRGLNSLESTLTFPASTSTIF

SEQ ID NO: 13373 - protein, 104 aa, Homo Sapiens
MKHTQSGQSTSPLVIDYTCRVCQMAFVFSSLIPLLLMTPVFCLGNTSECFQNFSQSHKCILMHSPPSAMAELPPSANTSVCSTLYFYGIAIFLGSFVLSLLTIM

SEQ ID NO: 13374 - protein, 245 aa, Homo Sapiens
MKHTQSGQSTSPLVIDYTCRVCQMAFVFSSLIPLLLMTPVFCLGNTSECFQNFSQSHKCILMHSPPSAMAELPPSANTSVCSTLYFYGIAIFLGSFVLSLLTIMVLLIRAQTLYKKFVKSTGFLGSEQWAVIHIVDQRVRFYPVAFFCCWGPAVILMIIKLTKPQDTKLHMALYVLQALTATSQGLLNCGVYGWTQHKFHQLKQEARRDADTQTPLLCSQKRFYSRGLNSLESTLTFPASTSTIF

SEQ ID NO: 13375 - protein, 28 aa, Homo Sapiens
MVSAAAPSLLILLLLLLGSVPATDARSV

SEQ ID NO: 13376 - protein, 44 aa, Homo Sapiens
MVSAAAPSLLILLLLLLGSVPATDARSVPLKATFLEDVAGSGEA

SEQ ID NO: 13377 - protein, 140 aa, Homo Sapiens
MVSAAAPSLLILLLLLLGSVPATDARSVPLKATFLEDVAGSGEAEGSSASSPSLPPPWTPALSPTSMGPQPITLGGPSPPTNFLDGIVDFFRQYVMLIAVVGSLAFLLMFIVCAAVITRQKQKASAYYPSSFPKKKYVDQ

SEQ ID NO: 13378 - protein, 283 aa, Homo Sapiens
MVSAAAPSLLILLLLLLGSVPATDARSVPLKATFLEDVAGSGEAEGSSASSPSLPPPWTPALSPTSMGPQPITLGGPSPPTNFLDGIVDFFRQYVMLIAVVGSLAFLLMFIVCAAVITRQKQKASAYYPSSFPKKKYVDQSDRAGGPRAFSEVPDRAPDSRPEEALDSSRQLQADILAATQNLKSPTRAALGGGDGARMVEGRGAEEEEKGSQEGDQEVQGHGVPVETPEAQEEPCSGVLEGAVVAGEGQGELEGSLLLAQEAQGPVGPPESPCACSSVHPSV

SEQ ID NO: 13379 - protein, 70 aa, Homo Sapiens
MASDLIRTILAVALISKLGTAVDAELMPSGAILQNKRENLPRVCHALAFLGMARCQDLFLVRLQGWKLGT

SEQ ID NO: 13380 - protein, 130 aa, Homo Sapiens
MASDLIRTILAVALISKLGTAVDAELMPSGAILQNKRENLPRVCHALAFLGMARCQDLFLVRLQGWKLGTRFQDGPRSTPQEEGGSPQRKRGMPVQIHFLLKSFLSSPITFAFISLARTVSLATAICKIV

SEQ ID NO: 13381 - protein, 130 aa, Homo Sapiens; identical to SEQ ID NO: 13380

SEQ ID NO: 13382 - protein, 130 aa, Homo Sapiens; identical to SEQ ID NO: 13380

SEQ ID NO: 13383 - protein, 258 aa, Homo Sapiens
FFSLLATAILGAVSWQPTNGIFLSMFLIVLPLESMAHGLFHELGNCLGGTSVGYAIVIPTNFCSGHTHGTGEWALAGGDTLRLDTLIEWWREKNGSFCSRLIIVLDSENSTPWVKEVRKINDQYIAVQGAELIKTVDIEEADPPQLGDFTKDWVEYNCNSSNNICWTEKGRTVKAVYGVSKRWSDYTLHLPTGSDVAKHWMLHFPRITYPLVHLANWLCGLNLFWICKTCFRCLKRLKMSWFLPTVLDTGQGFKLVKS

SEQ ID NO: 13384 - protein, 697 aa, Homo Sapiens
MCKSLRYCFSHCLYLAMTRLEEVNREVNMHSSVRYLGYLARINLLVAICLGLYVRWEKTANSLILVIFILGLFVLGIASILYYYFSMEAASLSLSNLWFGFLLGLLCFLDNSSFKNDVKEESTKYLLLTSIVLRILCSLVERISGYVRHRPTLLTTVEFLELVGFAIASTTMLVEKSLSVILLVVALAMLIIDLRMKSFLAIPNLVIFAVLLFFSSLETPKNPIAFACFFICLITDPFLDIYFSGLSVTERWKPFLYRGRICRRLSVVFAGMIELTFFILSAFKLRDTHLWYFVIPGFSIFGIFWMICHIIFLLTLWGFHTKLNDCHKVYFTHRTDYNSLDRIMASKGMRHFCLISEQLVFFSLLATAILGAVSWQPTNGIFLSMFLIVLPLESMAHGLFHELGNCLGGTSVGYAIVIPTNFCSPDGQPTLLPPEHVQELNLRSTGMLNAIQRFFAYHMIETYGCDYSTSGLSFDTLHSKLKAFLELRTVDGPRHDTYILYYSGHTHGTGEWALAGGDTLRLDTLIEWWREKNGSFCSRLIIVLDSENSTPWVKEVRKINDQYIAVQGAELIKTVDIEEADPPQLGDFTKDWVEYNCNSSNNICWTEKGRTVKAVYGVSKRWSDYTLHLPTGSDVAKHWMLHFPRITYPLVHLANWLCGLNLFWICKTCFRCLKRLKMSWFLPTVLDTGQGFKLVKS

SEQ ID NO: 13385 - protein, 697 aa, Homo Sapiens; identical to SEQ ID NO: 13384

SEQ ID NO: 13386 - protein, 124 aa, Homo Sapiens
MFLIVLPLESMAHGLFHELGNCLGGTSVGYAIVIPTNFCSPDGQPTLLPPEHVQELNLRSTGMLNAIQRFFAYHMIETYGCDYSTSGLSFDTLHSKLKAFLELRTVDGPRHDTYILYYSGHTHG

SEQ ID NO: 13387 - protein, 313 aa, Homo Sapiens
MFLIVLPLESMAHGLFHELGNCLGGTSVGYAIVIPTNFCSPDGQPTLLPPEHVQELNLRSTGMLNAIQRFFAYHMIETYGCDYSTSGLSFDTLHSKLKAFLELRTVDGPRHDTYILYYSGHTHGTGEWALAGGDTLRLDTLIEWWREKNGSFCSRLIIVLDSENSTPWVKEVRKINDQYIAVQGAELIKTVDIEEADPPQLGDFTKDWVEYNCNSSNNICWTEKGRTVKAVYGVSKRWSDYTLHLPTGSDVAKHWMLHFPRITYPLVHLANWLCGLNLFWICKTCFRCLKRLKMSWFLPTVLDTGQGFKLVKS

SEQ ID NO: 13388 - protein, 112 aa, Homo Sapiens
MRHFCLISEQLVFFSLLATAILGAVSWQPTNGIFLSMFLIVLPLESMAHGLFHELGNCLGGTSVGYAIVIPTNFCSPDGQPTLLPPEHVQELNLRSTGMLNAIQRFFAYHMI

SEQ ID NO: 13389 - protein, 111 aa, Homo Sapiens
MEPRALVTALSLGLSLCSLGLLVTAIFTDHWYETDPRRHKESCERSRAGADPPDQKNRLMPLSHLLGPLEEVLLPGHRPGHRHPHPERYCAAMHGHQVPLFSAHPLAKHSF

SEQ ID NO: 13390 - protein, 297 aa, Homo Sapiens
MEPRALVTALSLGLSLCSLGLLVTAIFTDHWYETDPRRHKESCERSRAGADPPDQKNRLMPLSHLPLRDSPPLGRRLLPGGPGRADPESWRSLLGLGGLDAECGRPLFATYSGLWRKCYFLGIDRDIDTLILKGIAQRCTAIKYHFSQPIRLRNIPFNLTKTIQQDEWHLLHLRRITAGFLGMAVAVLLCGCIVATVSFFWEESLTQHVAGLLFLMTGIFCTISLCTYAASISYDLNRLPKLIYSLPADVEHGYSWSIFCAWCSLGFIVAAGGLCIAYPFISRTKIAQLKSGRDSTV

SEQ ID NO: 13391 - protein, 233 aa, Homo Sapiens
MALNNFLFAQCACYFLAFLFSFVVVVPLSENGHDFRGRCLLFTEGMWLSANLTVQERERFTVQEWGPPAACRFSLLASLLSLLLAAAHAWRTLFFLCKGHEGSFFSAFLNLLVSAFVVFLVFIASTIVSVGFTMWCDTITEKGTVPHSCEELQDIDLELGVDNSAFYDQFAIAQFGLWASWLAWLAITTLAFLKVYHNYRQEDLLDSLIHEKELLLARPSPRTSFQEEKSAVI

SEQ ID NO: 13392 - protein, 190 aa, Homo Sapiens
MALNNFLFAQCACYFLAFLFSFVVVVPLSENGHDFRGRCLLFTEGMWLSANLTVQERERFTVQEWGPPAACRFSLLASLLSLLLAAAHAWRTLFFLCKGHEGSFFSAFLNLLVSAFVVFLVFIASTIVSVGFTMWCDTITEKGTVPHSCEELQDIDLELGVDNSAFYDQFAIAQGSLIDSHGVETPPGQS

SEQ ID NO: 13393 - protein, 197 aa, Homo Sapiens
MALNNFLFAQCACYFLAFLFSFVVVVPLSENGHDFRGRCLLFTEGMWLSANLTVQERERFTVQEWGPPAACRFSLLASLLSLLLAAAHAWRTLFFLCKGHEGSFFSAFLNLLVSAFVVFLVFIASTIVSVGFTMWCDTITEKGTVPHSCEELQDIDLELGVDNSAFYDQFAIAQVGGSGQEGRLAMLGGGHLLLDIC

SEQ ID NO: 13394 - protein, 211 aa, Homo Sapiens
MALNNFLFAQCACYFLAFLFSFVVVVPLSENGHDFRGRCLLFTEGMWLSANLTVQERERFTVQEWGPPAACRFSLLASLLSLLLAAAHAWRTLFFLCKGHEGSFFSAFLNLLVSAFVVFLVFIASTIVSVGFTMWCDTITEKGTVPHSCEELQDIDLELGVDNSAFYDQFAIAQVQFRTPGWPLKALAGRGWPEDASPGQEPSKGAGHGWA

SEQ ID NO: 13395 - protein, 182 aa, Homo Sapiens
MCTPVRVSIVCVMGAVGAVWTAPLPLPWAPTPSIHLREEGAAFPFCRVCVLRPRRSKWRSWDVNLGPRRRGLLGCGPCPSGKPRVHLQRTRSGAGAEAGGLPTRGSMRGCPFLGSSAAKCSLLLRPPSRGEASPWLPEFMTHPVHHQQLACVSGWLGTSLLEATCLGPHGGSWWGHHPGSRE

SEQ ID NO: 13396 - protein, 78 aa, Homo Sapiens
  misc_feature (1)..(1): Xaa can be any naturally occurring amino acid
XPDPREGAAAGPAVPTHLLPRGEERCHLGTVQAGGAGPDLPAALGGTGLPGEAAGGLCLGPGHMQPCVCPLDATCSEP

SEQ ID NO: 13397 - protein, 172 aa, Homo Sapiens
MCTSGQIIGSLLVLSVLEIGLGVSSVAVGAVSFSLALREHKPQLGDSSPFLLCGICGILCAKKKSGLVMILFSACCICGLIGGILNFQFLRAVTKKTSSLYPLHLASMSLACIGIGGCTLSSWLTCRLASYEQRRMFSEREHSLHHSHEMAEKEITDNMSNGGPQLIFNGRV

SEQ ID NO: 13398 - protein, 179 aa, Homo Sapiens
MCTSGQIIGSLLVLSVLEIGLGVSSVAVGAVSFSLALREHKPQLGDSSPFLLCGICGILCAKKKSGLVMILFSACCICGLIGGILNFQFLRAVTKKTSSLYPLHLASMSLACIGIGGCTLSSWLTCRLASYEQRRMFSEREHSLHHSHEMAEKRLRAIEITDLPSCPVVPPTPELPTRK

SEQ ID NO: 13399 - protein, 104 aa, Homo Sapiens
MILFSACCICGLIGGILNFQFLRAVTKKTSSLYPLHLASMSLACIGIGGCTLSSWLTCRLASYEQRRMFSEREHSLHHSHEMAEKEITDNMSNGGPQLIFNGRV

SEQ ID NO: 13400 - protein, 89 aa, Homo Sapiens
MILFSACCICGLIGGILNFQFLRAVTKKTSSLYPLHLASMSLACIGIGGCTLSSWLTCRLASYEQRRMFSEREHSLHHSHEMAEKIEGY

SEQ ID NO: 13401 - protein, 111 aa, Homo Sapiens
MILFSACCICGLIGGILNFQFLRAVTKKTSSLYPLHLASMSLACIGIGGCTLSSWLTCRLASYEQRRMFSEREHSLHHSHEMAEKRLRAIEITDLPSCPVVPPTPELPTRK

SEQ ID NO: 13402 - protein, 34 aa, Homo Sapiens
MASRVLAALIVASVVGLAELYVMVRAMEGELGEL

SEQ ID NO: 13403 - protein, 125 aa, Homo Sapiens
MASSLLAGERLVRALGPGGELEPERLPRKLRAELEAALGKKHKGGDSSSGPQRLVSFRLIRDLHQHLRERDSKLYLHELLEGSEIYLPEVVKPPRNPELVARLEKIKIQLANEEYKRITRNVTCQ

SEQ ID NO: 13404 - protein, 208 aa, Homo Sapiens
MASSLLAGERLVRALGPGGELEPERLPRKLRAELEAALGKKHKGGDSSSGPQRLVSFRLIRDLHQHLRERDSKLYLHELLEGSEIYLPEVVKPPRNPELVARLEKIKIQLANEEYKRITRNVTCQDTRHGGTLSDLGKQVRSLKALVITIFNFIVTVVAAFVCTYLGSQYIFTEMASRVLAALIVASVVGLAELYVMVRAMEGELGEL

SEQ ID NO: 13405 - protein, 89 aa, Homo Sapiens
MASSLLAGERLVRALGPGGELEPERLPRKLRAELEAALGKKHKGGDSSSGPQRLVSFRLIRDLHQHLRERGEPQSPVREPRTSCPAGED

SEQ ID NO: 13406 - protein, 124 aa, Homo Sapiens [sequence omitted]

SEQ ID NO: 13407 - protein, 88 aa, Homo Sapiens
MEEGGNLGGLIKMVHLLVLSGAWGMQMWVTFVSGFLLFRSLPRHTFGLVQSKLFPFYFHISMGCAFINLCILASQHAWAQLTFWEASQ

SEQ ID NO: 13408 - protein, 107 aa, Homo Sapiens
MEEGGNLGGLIKMVHLLVLSGAWGMQMWVTFVSGFLLFRSLPRHTFGLVQSKLFPFYFHISMGCAFINLCILASQHAWAQLTFWEASQLYLLFLSLTLATVNARWLE

SEQ ID NO: 13409 - protein, 170 aa, Homo Sapiens
MEEGGNLGGLIKMVHLLVLSGAWGMQMWVTFVSGFLLFRSLPRHTFGLVQSKLFPFYFHISMGCAFINLCILASQHAWAQLTFWEASQLYLLFLSLTLATVNARWLEPRTTAAMWALQTVEKERGLGGEVPGSHQGPDPYRQLREKDPKYSALRQNFFRYHGLSSLCNLG

SEQ ID NO: 13410 - protein, 189 aa, Homo Sapiens
MEEGGNLGGLIKMVHLLVLSGAWGMQMWVTFVSGFLLFRSLPRHTFGLVQSKLFPFYFHISMGCAFINLCILASQHAWAQLTFWEASQLYLLFLSLTLATVNARWLEPRTTAAMWALQTVEKERGLGGEVPGSHQGPDPYRQLREKDPKYSALRQNFFRYHGLSSLCNLGCVLSNGLCLAGLALEIRSL

SEQ ID NO: 13411 - protein, 189 aa, Homo Sapiens; identical to SEQ ID NO: 13410

SEQ ID NO: 13412 - protein, 189 aa, Homo Sapiens; identical to SEQ ID NO: 13410

SEQ ID NO: 13413 - protein, 189 aa, Homo Sapiens; identical to SEQ ID NO: 13410

SEQ ID NO: 13414 - protein, 189 aa, Homo Sapiens; identical to SEQ ID NO: 13410

SEQ ID NO: 13415 - protein, 189 aa, Homo Sapiens; identical to SEQ ID NO: 13410

SEQ ID NO: 13416 - protein, 189 aa, Homo Sapiens; identical to SEQ ID NO: 13410

SEQ ID NO: 13417 - protein, 189 aa, Homo Sapiens; identical to SEQ ID NO: 13410

SEQ ID NO: 13418 - protein, 120 aa, Homo Sapiens
MGCAFINLCILASQHAWAQLTFWEASQLYLLFLSLTLATVNARWLEPRTTAAMWALQTVEKERGLGGEVPGSHQGPDPYRQLREKDPKYSALRQNFFRYHGLSSLCNLGCVLSNGLCLAG

SEQ ID NO: 13419 - protein, 128 aa, Homo Sapiens
MGCAFINLCILASQHAWAQLTFWEASQLYLLFLSLTLATVNARWLEPRTTAAMWALQTVEKERGLGGEVPGSHQGPDPYRQLREKDPKYSALRQNFFRYHGLSSLCNLGCVLSNGLCLAGLALEIRSL

SEQ ID NO: 13420 - protein, 106 aa, Homo Sapiens
MQRLPAATRATLILSLAFASLHSACSAASSSNSSSLTAHHPDPGTLEQCLNVDFCPQAARCCRTGVDEYGWIAAAVGWSLWFLTLILLCVDKLMKLTPDEPKDLQA

SEQ ID NO: 13421 - protein, 83 aa, Homo Sapiens
MQRLPAATRATLILSLAFASLHSACSADVDFCPQAARCCRTGVDEYGWIAAAVGWSLWFLTLILLCVDKLMKLTPDEPKDLQA

SEQ ID NO: 13422 - protein, 107 aa, Homo Sapiens
MQRLPAATRATLILSLAFASLHSACSAEASSSNSSSLTAHHPDPGTLEQCLNVDFCPQAARCCRTGVDEYGWIAAAVGWSLWFLTLILLCVDKLMKLTPDEPKDLQA

SEQ ID NO: 13423 - protein, 105 aa, Homo Sapiens
MQRLPAATRATLILSLAFASLHSACSAEASSSNSSSLTAHHPDPGTLEQCLRSGYLANLRGEADQLWKFCTVLCFWESRRSSSRIALMREAEEWPGWRSSVELVG

SEQ ID NO: 13424 - protein, 49 aa, Homo Sapiens
MALPPGPAALRHTLLLLPALLSSAQYQPCLSPSQRPPAVFQVGGSWSHK

SEQ ID NO: 13425 - protein, 40 aa, Homo Sapiens
MALPPGPAALRHTLLLLPALLSSGGPGTPRLAWYLDGQLQ

SEQ ID NO: 13426 - protein, 170 aa, Homo Sapiens
MALPPGPAALRHTLLLLPALLSSGGPGTPRLAWYLDGQLQEASTSRLLSVGGEAFSGGTSTFTVTAHRAQHELNCSLQDPRSGRSANASVILNVQFKPEIAQVGAKYQEAQGPGLLVVLFALVRANPPANVTWIDQDGPVTVNTSDFLVLDAQNYPWLTNHTVQLQLRSL

SEQ ID NO: 13427 - protein, 37 aa, Homo Sapiens
MALPPGPAALRHTLLLLPALLSSGPQKWPISQRLCHP

SEQ ID NO: 13428 - protein, 168 aa, Homo Sapiens
MALPPGPAALRHTLLLLPALLSSGWGELEPQIDGQTWAERALRENERHAFTCRVAGGPGTPRLAWYLDGQLQEASTSRLLSVGGEAFSGGTSTFTVTAHRAQHELNCSLQDPRSGRSANASVILNVQCPSRHPSLISSDSNNLKLNNVRLPRENMSLPSNLQLNDLTP

SEQ ID NO: 13429 - protein, 138 aa, Homo Sapiens
MALPPGPAALRHTLLLLPALLSSGWGELEPQIDGQTWAERALRENERHAFTCRVAGGPGTPRLAWYLDGQLQEASTSRLLSVGGEAFSGGTSTFTVTAHRAQHELNCSLQDPRSGRSANASVILNVQFKPEIAQVGAK

SEQ ID NO: 13430 - protein, 366 aa, Homo Sapiens
MALPPGPAALRHTLLLLPALLSSGWGELEPQIDGQTWAERALRENERHAFTCRVAGGPGTPRLAWYLDGQLQEASTSRLLSVGGEAFSGGTSTFTVTAHRAQHELNCSLQDPRSGRSANASVILNVQFKPEIAQVGAKYQEAQGPGLLVVLFALVRANPPANVTWIDQDGPVTVNTSDFLVLDAQNYPWLTNHTVQLQLRSLAHNLSVVATNDVGVTSASLPAPGLLATRVEVPLLGIVVAAGLALGTLVGFSTLVACLVCRKEKKTKGPSRHPSLISSDSNNLKLNNVRLPRENMSLPSNLQLNDLTPDSRAVKPADRQMAQNNSRPELLDPEPGGLLTSQGFIRLPVLGYIYRVSSVSSDEIWL

SEQ ID NO: 13431 - protein, 351 aa, Homo Sapiens
MALPPGPAALRHTLLLLPALLSSGWGELEPQIDGQTWAERALRENERHAFTCRVAGGPGTPRLAWYLDGQLQEASTSRLLSVGGEAFSGGTSTFTVTAHRAQHELNCSLQDPRSGRSANASVILNVQFKPEIAQVGAKYQEAQGPGLLVVLFALVRANPPANVTWIDQDGPVTVNTSDFLVLDAQNYPWLTNHTVQLQLRSLAHNLSVVATNDVGVTSASLPAPGLLATRVEVPLLGIVVAAGLALGTLVGFSTLVACLVCRKEKKTKGPSRHPSLISSDSNNLKLNNVRLPRENMSLPSNLQLNDLTPDSRAVKPADRQMAQNNSRPELLDPEPGGLLTSQGRRNQDKDA

SEQ ID NO: 13432 - protein, 381 aa, Homo Sapiens
MALPPGPAALRHTLLLLPALLSSGWGELEPQIDGQTWAERALRENERHAFTCRVAGGPGTPRLAWYLDGQLQEASTSRLLSVGGEAFSGGTSTFTVTAHRAQHELNCSLQDPRSGRSANASVILNVQFKPEIAQVGAKYQEAQGPGLLVVLFALVRANPPANVTWIDQDGPVTVNTSDFLVLDAQNYPWLTNHTVQLQLRSLAHNLSVVATNDVGVTSASLPAPGLLATRVEVPLLGIVVAAGLALGTLVGFSTLVACLVCRKEKKTKGPSRHPSLISSDSNNLKLNNVRLPRENMSLPSNLQLNDLTPDSRVKPADRQMAQNNSRPELLDPEPGGLLTSQACLLHHGTPALTNPWLPHQQEGALPGGWSPQAHNSTVWKL

SEQ ID NO: 13433 - protein, 322 aa, Homo Sapiens
MALPPGPAALRHTLLLLPALLSSGWGELEPQIDGQTWAERALRENERHAFTCRVAGGPGTPRLAWYLDGQLQEASTSRLLSVGGEAFSGGTSTFTVTAHRAQHELNCSLQDPRSGRSANASVILNVQFKPEIAQVGAKYQEAQGPGLLVVLFALVRANPPANVTWIDQDGPVTVNTSDFLVLDAQNYPWLTNHTVQLQLRSLAHNLSVVATNDVGVTSASLPAPGPSRHPSLISSDSNNLKLNNVRLPRENMSLPSNLQLNDLTPDSRAVKPADRQMAQNNSRPELLDPEPGGLLTSQGFIRLPVLGYIYRVSSVSSDEIWL

SEQ ID NO: 13434 - protein, 306 aa, Homo Sapiens
MALPPGPAALRHTLLLLPALLSSGWGELEPQIDGQTWAERALRENERHAFTCRVAGGPGTPRLAWYLDGQLQEASTSRLLSVGGEAFSGGTSTFTVTAHRAQHELNCSLQDPRSGRSANASVILNVQFKPEIAQVGAKYQEAQGPGLLVVLFALVRANPPANVTWIDQDGPVTVNTSDFLVLDAQNYPWLTNHTVQLQLRSLAHNLSVVATNDVGVTSASLPAPGPSRHPSLISSDSNNLKLNNVRLPRENMSLPSNLQLNDLTPDSRVKPADRQMAQNNSRPELLDPEPGGLLTSQGRRNQDKDA

SEQ ID NO: 13435 - protein, 322 aa, Homo Sapiens; identical to SEQ ID NO: 13433

SEQ ID NO: 13436 - protein, 322 aa, Homo Sapiens; identical to SEQ ID NO: 13433

SEQ ID NO: 13437 - protein, 167 aa, Homo Sapiens
MALPPGPAALRHTLLLLPALLSSGWGELEPQIDGQTWAERALRENERHAFTCRVAGGPGTPRLAWYLDGQLQEASTSRLLSVGGEAFSGGTSTFTVTAHRAQHELNCSLQDPRSGRSANASVILNVQWLLATRVEVPLLGIVVAAGLALGTLVGFSTLVACLVCRKE

SEQ ID NO: 13438 - protein, 218 aa, Homo Sapiens
MALPPGPAALRHTLLLLPALLSSVKPEIAQVGAKYQEAQGPGLLVVLFALVRANPPANVTWIDQDGPVTVNTSDFLVLDAQNYPWLTNHTVQLQLRSLAHNLSVVATNDVGVTSASLPAPGPSRHPSLISSDSNNLKLNNVRLPRENMSLPSNLQLNDLTPDSRAVKPADRQMAQNNSRPELLDPEPGGLLTSQGFIRLPVLGYIYRVSSVSSDEIWL

SEQ ID NO: 13439 - protein, 200 aa, Homo Sapiens
  misc_feature (1)..(1): Xaa can be any naturally occurring amino acid
XDQDGPVTVNTSDFLVLDAQNYPWLTNHTVQLQLRSLAHNLSVVATNDVGVTSASLPAPGLLATRVEVPLLGIVVAAGLALGTLVGFSTLVACLVCRKEKKTKGPSRHPSLISSDSNNLKLNNVRLPRENMSLPSNLQLNDLTPDSRVKPADRQMAQNNSRPELLDPEPGGLLTSQGFIRLPVLGYIYRVSSVSSDEIWL

SEQ ID NO: 13440 - protein, 195 aa, Homo Sapiens
  misc_feature (1)..(1): Xaa can be any naturally occurring amino acid
XLLRRRSGREPVKPEIAQVGAKYQEAQGPGLLVVLFALVRANPPANVTWIDQDGPVTVNTSDFLVLDAQNYPWLTNHTVQLQLRSLAHNLSVVATNDVGVTSASLPAPGPSRHPSLISSDSNNLKLNNVRLPRENMSLPSNLQLNDLTPDSRAVKPADRQMAQNNSRPELLDPEPGGLLTSQGFIRLPVLGYIYR

SEQ ID NO: 13441 - protein, 113 aa, Homo Sapiens
MEERAQHCLSRLLDNSALKQQELPIHRLYFTARRVLFVFFATGIFCLCMGIILILSARSTQEIEINYTRICANCAKLRENASNFDKECTCSIPFYLSGKMMVGEIQETRLTLH

SEQ ID NO: 13442 - protein, 291 aa, Homo Sapiens
MDSPWDELALAFSRTSMFPFFDIAHYLVSVMAVKRQPGAAALAWKNPISSWFTAMLHCFGGGILSCLLLAEPPLKFLANHTNILLASSIWYITFFCPHDLVSQGYSYLPVQLLASGMKEVTRTWKIVGGVTHANSYYKNGWIVMIAIGWARGAGGTIITNFERLVKGDWKPEGDEWLKMSYPAKVTLLGSVIFTFQHTQHLAISKHNLMFLYTIFIVATKITMMTTQTSTMTFAPFEDTLSWMLFGWQQPFSSCEKKSEAKSPSNGVGSLASKPVDVASDNVKKKHTKKNE

SEQ ID NO: 13443 - protein, 35 aa, Homo Sapiens
MLHCFGGGILSCLLLAEPPLKFLANHTNILLASSI

SEQ ID NO: 13444 - protein, 237 aa, Homo Sapiens
MLHCFGGGILSCLLLAEPPLKFLANHTNILLASSIWYITFFCPHDLVSQGYSYLPVQLLASGMKEVTRTWKIVGGVTHANSYYKNGWIVMIAIGWARGAGGTIITNFERLVKGDWKPEGDEWLKMSYPAKVTLLGSVIFTFQHTQHLAISKHNLMFLYTIFIVATKITMMTTQTSTMTFAPFEDTLSWMLFGWQQPFSSCEKKSEAKSPSNGVGSLASKPVDVASDNVKKKHTKKNE

SEQ ID NO: 13445 - protein, 162 aa, Homo Sapiens
  misc_feature (1)..(1): Xaa can be any naturally occurring amino acid
XSCLLLAEPPLKFLANHTNILLASSIWYITFFCPHDLVSQGYSYLPVQLLASGMKEVTRTWKIVGGVTHANSYYKNGWIVMIAIGWARGAGGTIITNFERLVKGDWKPEGDEWLKMSYPAKVTLLGSVIFTFQHTQHLAISKHNLMFLYTIFIVATKSLNWR

SEQ ID NO: 13446 - protein, 81 aa, Homo Sapiens
  misc_feature (1)..(1): Xaa can be any naturally occurring amino acid
XWIVMIAIGWARGAGGTIITNFERLVKGDWKPEGDEWLKMSYPAKVTLLGSVIFTFQHTQHLAISKHNLMFLYTIFIVATK

SEQ ID NO: 13447 - protein, 197 aa, Homo Sapiens
LRATPWFLTSLGRAALDLAIIFLSCVMKSKMRQALGFAKEARESPDTQALLTCAEKEEENQENLDWVPLTTLSHCKSLRTMTAISRYMELTIEPVQQAGCSATRLPGDGQTSAGDASLQDPPSYPPVQVIRARVSSGSSSEVSSINSDLEQKYWEALNSEQWDPEDVNLEGSKENVELLGSQVHQDSVRTAHLSDDD

SEQ ID NO: 13448 - protein, 150 aa, Homo Sapiens
MFILFPVCGSKFKSNSDREARERKRRRQLRASVFALALPLSLGPCWALWVAVPKASATIRGPQRRLLASLLQENTEILGYLLGSVAAFGSWASRIPPLSRIMESRCVAQAGVQWRDLGSLQPSPPNFKQFSCLSLPSSWDYSCQWSCRSC

SEQ ID NO: 13449 - protein, 113 aa, Homo Sapiens
MFILFPVCGSKFKSNSDREARERKRRRQLRASVFALALPLSLGPCWALWVAVPKASATIRGPQRRLLASLLQENTEILGYLLGSVAAFGSWASRIPPLSRIVRPGVGMGLWVT

SEQ ID NO: 13450 - protein, 121 aa, Homo Sapiens
MGEAPSPAPALWDWDYLDRCFARHRVCISFGLWICASSCWIAAHALLLYLRCAQKPRQDQSALCAACCLLTSLCDTVGALLARQLTIQSVDPNSSLIQIGKPERGRGGGSSGPVCLPWPCR

SEQ ID NO: 13451 - protein, 475 aa, Homo Sapiens
MGEAPSPAPALWDWDYLDRCFARHRVCISFGLWICASSCWIAAHALLLYLRCAQKPRQDQSALCAACCLLTSLCDTVGALLARQLTIQVFTGAYLAAIDLVNFMFILFPVCGSKFKSNSDREARERKRRRQLRASVFALALPLSLGPCWALWVAVPKASATIRGPQRRLLASLLQENTEILGYLLGSVAAFGSWASRIPPLSRIAPPPTLGITTQHEIWRGQMSKPSQSPSRSPSGHWRAAAQRQVLGTEMCRGKTFPSIHLWTRLLSALAGLLYASAIVAHDQHPEYLLRATPWFLTSLGRAALDLAIIFLSCVMKSKMRQALGFAKEARESPDTQALLTCAEKEEENQENLDWVPLTTLSHCKSLRTMTAISRYMELTIEPVQQAGCSATRLPGDGQTSAGDASLQDPPSYPPVQVIRARVSSGSSSEVSSINSDLEWDPEDVNLEGSKENVELLGSQVHQDSVRTAHLSDDD

SEQ ID NO: 13452 - protein, 428 aa, Homo Sapiens
MGEAPSPAPALWDWDYLDRCFARHRVCISFGLWICASSCWIAAHALLLYLRCAQKPRQDQSALCAACCLLTSLCDTVGALLARQLTIQVFTGAYLAAIDLVNFMFILFPVCGSKFKSNSDREARERKRRRQLRASVFALALPLSLGPCWALWVAVPKASATIRGPQRRLLASLLQENTEILGYLLGSVAAFGSWASRIPPLSRICRGKTFPSIHLWTRLLSALAGLLYASAIVAHDQHPEYLLRATPWFLTSLGRAALDLAIIFLSCVMKSKMRQALGFAKEARESPDTQALLTCAEKEEENQENLDWVPLTTLSHCKSLRTMTAISRYMELTIEPVQQAGCSATRLPGDGQTSAGDASLQDPPSYPPVQVIRARVSSGSSSEVSSINSDLEWDPEDVNLEGSKENVELLGSQVHQDSVRTAHLSDDD

SEQ ID NO: 13453 - protein, 396 aa, Homo Sapiens
MGEAPSPAPALWDWDYLDRCFARHRVCISFGLWICASSCWIAAHALLLYLRCAQKPRQDQSALCAACCLLTSLCDTVGALLARQLTIQVFTGAYLAAIDLVNFMFILFPVCGSKFKSNSDREARERKRRRQLRASVFALALPLSLGPCWALWVAVPKASATIRGPQRRLLASLLQENTEILGYLLGSVAAFGSWASRIPPLSRICRGKTFPSIHLWTRLLSALAGLLYASAIVAHDQHPEYLLRATPWFLTSLGRAALDLAIIFLSCVMKSKMRQALGFAKEARESPDTQALLTCAEKEEENQENLDWVPLTTLSHCKSLRTMTAISRYMELTIEPVQQAAVPPGCQVTGRRAPEMRPCRTPRRTLPFRSSGPGCLPAAPLRSPPSTPTWSGTLKM

SEQ ID NO: 13454 - protein, 438 aa, Homo Sapiens
MGEAPSPAPALWDWDYLDRCFARHRVCISFGLWICASSCWIAAHALLLYLRCAQKPRQDQSALCAACCLLTSLCDTVGALLARQLTIQVFTGAYLAAIDLVNFMFILFPVCGSKFKSNSDREARERKRRRQLRASVFALALPLSLGPCWALWVAVPKASATIRGPQRRLLASLLQENTEILGYLLGSVAAFGSWASRIPPLSRICRGKTFPSIHLWTRLLSALAGLLYASAIVAHDQHPEYLLRATPWFLTSLGRAALDLAIIFLSCVMKSKMRQALGFAKEARESPDTQALLTCAEKEEENQENLDWVPLTTLSHCKSLRTMTAISRYMELTIEPVQQAGCSATRLPGDGQTSAGDASLQDPPSYPPVQVIRARVSSGSSSEVSSINSDLEKYWEALNSEQWDPEDVNLEGSKENVELLGSQVHQDSVRTAHLSDDD

SEQ ID NO: 13455 - protein, 119 aa, Homo Sapiens
MKSKMRQALGFAKEARESPDTQALLTCAEKEEENQENLDWVPLTTLSHCKSLRTMTAISRYMELTIEPVQQAAVPPGCQVTGRRAPEMRPCRTPRRTLPFRSSGPGCLPAAPLSGTLKM

SEQ ID NO: 13456 - protein, 261 aa, Homo Sapiens
NFMFILFPVCGSKFKSNSDREARERKRRRQLRASVFALALPLSLGPCWALWVAVPKASATIRGPQRRLLASLLQENTEILGYLLGSVAAFGSWASRIPPLSRISKMRQALGFAKEARESPDTQALLTCAEKEEENQENLDWVPLTTLSHCKSLRTMTAISRYMELTIEPVQQAGCSATRLPGDGQTSAGDASLQDPPSYPPVQVIRARVSSGSSSEVSSINSDLEWDPEDVNLEGSKENVELLGSQVHQDSVRTAHLSDDD

SEQ ID NO: 13457 - protein, 124 aa, Homo Sapiens
GGRWPPADCGCCCRSCRSCRSCRCRRWVGRRSLSVRPPRGGSLLGPRPSRAHPCPHRWRWASRTAAATPRTSARPRPAGAACGTWACTPRSLHPPTMKLSRWPSPERKDQHSPRNPALSLGPRA

SEQ ID NO: 13458 - protein, 43 aa, Homo Sapiens
MARGPLAARGLRLLLPLLPLLPLLPLPQVALGFADGSCDPSDQ

SEQ ID NO: 13459 - protein, 209 aa, Homo Sapiens
MARGPLAARGLRLLLPLLPLLPLLPLPQVALGFADGSCDPSDQCPPQARWSSLWHVGLILLAVLLLLLCGVTAGCVRFCCLRKQAQAQPHLPPARQPCDVAVIPMDSDSPVHSTVTSYSSVQYPLGMRLPLPFGELDLDSMAPPAYSLYTPEPPPSYDEAVKMAKPREEGPALSQKPSPLLGASGLETTPVPQESGPNTQLPPCSPGAP

SEQ ID NO: 13460 - protein, 103 aa, Homo Sapiens
MARGPLAARGLRLLLPLLPLLPLLPLPQVGRAAFSLGSATAGRVPARTTPLPGSPLSPQVALGFADGSCDPSDQCPPQARWSSLWHVGLILLAVLLLLLCGVT

SEQ ID NO: 13461 - protein, 194 aa, Homo Sapiens
MERHCLLFILLTCLRWLCHDIPQGAGARWPRVSPVVEPCSPRLILLAVLLLLLCGVTAGCVRFCCLRKQAQAQPHLPPARQPCDVAVIPMDSDSPVHSTVTSYSSVQYPLGMRLPLPFGELDLDSMAPPAYSLYTPEPPPSYDEAVKMAKPREEGPALSQKPSPLLGASGLETTPVPQESGPNTQLPPCSPGAP

SEQ ID NO: 13462 - protein, 90 aa, Homo Sapiens
MGVRVHVVAASALLYFILLSGTRCEENCGNPEHCLTTDWVHLWYIWLLVVIGALLLLCGLTSLCFRCCCLSRQQNGEDGGPPPCEVTVIA

SEQ ID NO: 13463 - protein, 183 aa, Homo Sapiens
MGVRVHVVAASALLYFILLSGTRCEENCGNPEHCLTTDWVHLWYIWLLVVIGALLLLCGLTSLCFRCCCLSRQQNGEDGGPPPCEVTVIAFDHDSTLQSTITSLQSVFGPAARRILAVAHSHSSLGQLPSSLDTLPGYEEALHMSRFTVAMCGQKAPDLPPVPEEKQLPPTEKESTRIVDSWN

SEQ ID NO: 13464 - protein, 163 aa, Homo Sapiens
MSWRPQPCCISSCCLTTDWVHLWYIWLLVVIGALLLLCGLTSLCFRCCCLSRQQNGEDGGPPPCEVTVIAFDHDSTLQSTITSLQSVFGPAARRILAVAHSHSSLGQLPSSLDTLPGYEEALHMSRFTVAMCGQKAPDLPPVPEEKQLPPTEKESTRIVDSWN

SEQ ID NO: 13465 - protein, 323 aa, Homo Sapiens
MAAPKGSLWVRTQLGLPPLLLLTMALAGGSGTASAEAFDSVLGDTASCHRACQLTYPLHTYPKEEELYACQRGCRLFSICQFVDDGIDLNRTKLECESACTEAYSQSDEQYACHLGCQNQLPFAELRQEQLMSLMPKMHLLFPLTLVRSFWSDMMDSAQSFITSSWTFYLQADDGKIVIFQSKPEIQYAPHLEQEPTNLRESSLSKMSYLQMRNSQAHRNFLEDGESDGFLRCLSLNSGWILTTTLVLSVMVLLWICCATVATAVEQYVPSEKLSIYGDLEFMNEQKLNRYPASSLVVVRSKTEDHEEAGPLPTKVNLAHSEI

SEQ ID NO: 13466 - protein, 145 aa, Homo Sapiens
MAAPKGSLWVRTQLGLPPLLLLTMALAGGSGTASAEAFDSVLGDTASCHRACQLTYPLHTYPKEEELYACQRGCRLFSICQFVDDGIDLNRTKLECESACTEAYSQSDEQYACHLGCQNQLPFAELRQEQVRNNTAFQTSLLRWH

SEQ ID NO: 13467 - protein, 285 aa, Homo Sapiens
MAAPKGSLWVRTQLGLPPLLLLTMALAGGSGTASAEAFDSVLGDTASCHRACQLTYPLHTYPKVSASLYTVDHIEEELYACQRGCRLFSICQFVDDGIDLNRTKLECESACTEAYSQSDEQYACHLGCQNQLPFAELRQEQLMSLMPKMHLLFPLTLVRSFWSDMMDSAQSFITSSWTFYLQADDGKIVIFQSKPEIQYAPHLEQEPTNLRESSLSKMSYLQMRNSQAHRNFLEDGESDGFLRCLSLNSGWILTTTLVLSVMVLLWICCATVATAVEQYVPSEVN

SEQ ID NO: 13468 - protein, 192 aa, Homo Sapiens
MSLMPKMHLLFPLTLVRSFWSDMMDSAQSFITSSWTFYLQADDGKIVIFQSKPEIQYAPHLEQEPTNLRESSLSKMSYLQMRNSQAHRNFLEDGESDGFLRCLSLNSGWILTTTLVLSVMVLLWICCATVATAVEQYVPSEKLSIYGDLEFMNEQKLNRYPASSLVVVRSKTEDHEEAGPLPTKVNLAHSEI

SEQ ID NO: 13469 - protein, 192 aa, Homo Sapiens; identical to SEQ ID NO: 13468

SEQ ID NO: 13470 - protein, 192 aa, Homo Sapiens; identical to SEQ ID NO: 13468

SEQ ID NO: 13471 - protein, 144 aa, Homo Sapiens
MSLMPKMHLLFPLTLVRSFWSDMMDSAQSFITSSWTFYLQADDGKIVIFQSKPEIQYAPHLEQEPTNLRESSLSKMSYLQMRNSQAHRNFLEDGESDGFLRCLSLNSGWILTTTLVLSVMVLLWICCATVATAVEQYVPSEVNL

SEQ ID NO: 13472 - protein, 144 aa, Homo Sapiens; identical to SEQ ID NO: 13471

SEQ ID NO: 13473 - protein, 180 aa, Homo Sapiens
MATRGGAGVAMAVWSLLSARAVTAFLLLFLPRFLQAQTFSFPFQQPEKCDNNQYFDISALSCVPCGANQRQDARGTSCVCLPGFQMISNNGGPAIICKKCPENMKGVTEDGWNCISCPSDLTAEGKCHCPIGHILDSNSGKWLLTRRIFLVDAVSGRENDLGTQPRVIRVATQISLSVHL

SEQ ID NO: 13474 - protein, 147 aa, Homo Sapiens
MATRGGAGVAMAVWSLLSARAVTAFLLLFLPRFLQAQTFSFPFQQPEKCDNNQYFDISALSCVPCGANQRQDARGTSCVCLPGFQMISNNGGPAIICKKCPENMKGVTEDGWNCISCPSDLTAEGKCHCPIGHILGSHSCPGWSVVV

SEQ ID NO: 13475 - protein, 995 aa, Homo Sapiens
MATRGGAGVAMAVWSLLSARAVTAFLLLFLPRFLQAQTFSFPFQQPEKCDNNQYFDISALSCVPCGANQRQDARGTSCVCLPGFQMISNNGGPAIICKKCPENMKGVTEDGWNCISCPSDLTAEGKCHCPIGHILVERDINGTLLSQATCELCDGNENSFMVVNALGDRCVRCEPTFVNTSRSCACSEPNILTGGLCFSSTGNFPLRRISAARYGEVGMSLTSEWFAKYLQSSAAACWVYANLTSCQALGNMCVMNMNSYDFATFDACGLFQFIFENTAGLSTVHSISFWRQNLPWLFYGDQLGLAPQVLSSTSLPTNFSFKGENQNTKLKFVAASYDIRGNFLKWQTLEGGVLQLCPDTETRLNAAYSFGTTYQQNCEIPISKILIDFPTPIFYDVYLEYTDENQHQYILAVPVLNLNLQHNKIFVNQDSNSGKWLLTRRIFLVDAVSGRENDLGTQPRVIRVATQISLSVHLVPNTINGNIYPPLITIAYSDIDIKDANSQSVKVSFSVTYEMDHGEAHVQTDIALGVLGGLAVLASLLKTAGWKRRIGSPMIDLQTVVKFLVYYAGDLANVFFIITVGTGLYWLIFFKAQKSVSVLLPMPIQEERFVTYVGCAFALKALQFLHKLISQITIDVFFIDWERPKGKVLKAVEGEGGVRSATVPVSIWRTYFVANEWNEIQTVRKINSLFQVLTVLFFLEVVGFKNLALMDSSSSLSRNPPSYIAPYSCILRYAVSAALWLAIGIIQVVFFAVFYERFIEDKIRQFVDLCSMSNISVFLLSHKCFGYYIHGRSVHGHADTNMEEMNMNLKREAENLCSQRGLVPNTDGQTFEIAISNQMRQHYDRIHETLIRKNGPARLLSSSASTFEQSIKAYHMMNKFLGSFIDHVHKEMDYFIKDKLLLERILGMEFMEPMEKSIFYNDEGYSFSSVLYYGNEATLLIFDLLFFCVVDLACQNFILASFLTYLQQEIFRYIRNTVGQKNLASKTLVDQRFLI

SEQ ID NO: 13476 - protein, 119 aa, Homo Sapiens
MATRGGAGVAMAVWSLLSARAVTAFLLLFLPRFLQAQTFSFPFQQPEKCDNNQYFDISALSCVPCGANQRQDARGTSCVCLPGFQMISNNGGPAIICKKCPENMVLQKMAGTAFLALVT

SEQ ID NO: 13477 - protein, 985 aa, Homo Sapiens
MAVWSLLSARAVTAFLLLFLPRFLQAQTFSFPFQQPEKCDNNQYFDISALSCVPCGANQRQDARGTSCVCLPGFQMISNNGGPAIICKKCPENMKGVTEDGWNCISCPSDLTAEGKCHCPIGHILVERDINGTLLSQATCELCDGNENSFMVVNALGDRCVRCEPTFVNTSRSCACSEPNILTGGLCFSSTGNFPLRRISAARYGEVGMSLTSEWFAKYLQSSAAACWVYANLTSCQALGNMCVMNMNSYDFATFDACGLFQFIFENTAGLSTVHSISFWRQNLPWLFYGDQLGLAPQVLSSTSLPTNFSFKGENQNTKLKFVAASYDIRGNFLKWQTLEGGVLQLCPDTETRLNAAYSFGTTYQQNCEIPISKILIDFPTPIFYDVYLEYTDENQHQYILAVPVLNLNLQHNKIFVNQDSNSGKWLLTRRIFLVDAVSGRENDLGTQPRVIRVATQISLSVHLVPNTINGNIYPPLITIAYSDIDIKDANSQSVKVSFSVTYEMDHGEAHVQTDIALGVLGGLAVLASLLKTAGWKRRIGSPMIDLQTVVKFLVYYAGDLANVFFIITVGTGLYWLIFFKAQKSVSVLLPMPIQEERFVTYVGCAFALKALQFLHKLISQITIDVFFIDWERPKGKVLKAVEGEGGVRSATVPVSIWRTYFVANEWNEIQTVRKINSLFQVLTVLFFLEVVGFKNLALMDSSSSLSRNPPSYIAPYSCILRYAVSAALWLAIGIIQVVFFAVFYERFIEDKIRQFVDLCSMSNISVFLLSHKCFGYYIHGRSVHGHADTNMEEMNMNLKREAENLCSQRGLVPNTDGQTFEIAISNQMRQHYDRIHETLIRKNGPARLLSSSASTFEQSIKAYHMMNKFLGSFIDHVHKEMDYFIKDKLLLERILGMEFMEPMEKSIFYNDEGYSFSSVLYYGNEATLLIFDLLFFCVVDLACQNFILASFLTYLQQEIFRYIRNTVGQKNLASKTLVDQRFLI

SEQ ID NO: 13478 - protein, 397 aa, Homo Sapiens
MKGVTEDGWNCISCPSDLTAEGKCHCPIGHILVERDINGTLLSQATCELCDGNENSFMVVNALGDRCVRCEPTFVNTSRSCACSEPNILTGGLCFSSTGNFPLRRISAARYGEVGMSLTSEWFAKYLQSSAAACWVYANLTSCQALGNMCVMNMNSYDFATFDACGLFQFIFENTAGLSTVHSISFWRQNLPWLFYGDQLGLAPQVLSSTSLPTNFSFKGENQNTKLKFVAASYDIRGNFLKWQTLEGGVLQLCPDTETRLNAAYSFGTTYQQNCEIPISKILIDFPTPIFYDVYLEYTDENQHQYILAVPVLNLNLQHNKIFVNQDSNSGKWLLTRRIFLVDAVSGRENDLGTQPRVIRVATQISLSVHLVPNTINGNIYPPLITIAYSDIDIKDA

SEQ ID NO: 13479 - protein, 914 aa, Homo Sapiens
MSLSHWPYFRLVLNFRPQVICLPQPPKVLGYRLEPPHLTLACTLEGMYNIIEEILERDINGTLLSQATCELCDGNENSFMVVNALGDRCVRCEPTFVNTSRSCACSEPNILTGGLCFSSTGNFPLRRISAARYGEVGMSLTSEWFAKYLQSSAAACWVYANLTSCQALGNMCVMNMNSYDFATFDACGLFQFIFENTAGLSTVHSISFWRQNLPWLFYGDQLGLAPQVLSSTSLPTNFSFKGENQNTKLKFVAASYDIRGNFLKWQTLEGGVLQLCPDTETRLNAAYSFGTTYQQNCEIPISKILIDFPTPIFYDVYLEYTDENQHQYILAVPVLNLNLQHNKIFVNQDSNSGKWLLTRRIFLVDAVSGRENDLGTQPRVIRVATQISLSVHLVPNTINGNIYPPLITIAYSDIDIKDANSQSVKVSFSVTYEMDHGEAHVQTDIALGVLGGLAVLASLLKTAGWKRRIGSPMIDLQTVVKFLVYYAGDLANVFFIITVGTGLYWLIFFKAQKSVSVLLPMPIQEERFVTYVGCAFALKALQFLHKLISQITIDVFFIDWERPKGKVLKAVEGEGGVRSATVPVSIWRTYFVANEWNEIQTVRKINSLFQVLTVLFFLEVVGFKNLALMDSSSSLSRNPPSYIAPYSCILRYAVSAALWLAIGIIQVVFFAVFYERFIEDKIRQFVDLCSMSNISVFLLSHKCFGYYIHGRSVHGHADTNMEEMNMNLKREAENLCSQRGLVPNTDGQTFEIAISNQMRQHYDRIHETLIRKNGPARLLSSSASTFEQSIKAYHMMNKFLGSFIDHVHKEMDYFIKDKLLLERILGMEFMEPMEKSIFYNDEGYSFSSVLYYGNEATLLIFDLLFFCVVDLACQNFILASFLTYLQQEIFRYIRNTVGQKNLASKTLVDQRFLI

SEQ ID NO: 13480 - protein, 6 aa, Homo Sapiens
MVVNAL

SEQ ID NO: 13481 - protein, 38 aa, Homo Sapiens
MVVNALGDRCVRCEPTFVNTSRSCACSEPNILTGGLCF

SEQ ID NO: 13482 - protein, 239 aa, Homo Sapiens
  misc_feature (1)..(1): Xaa can be any naturally occurring amino acid
XFYDVYLEYTDENQHQYILAVPVLNLNLQHNKIFVNQDSNSGKWLLTRRIFLVDAVSGRENDLGTQPRVIRVATQISLSVHLVPNTINGNIYPPLITIAYSDIDIKDANSQSVKVSFSVTYEMDHGEAHVQTDTEFCTCCPGWSAMARSWLTATSASRVQAILLSQPPEYLGLQIALGVLGGLAVLASLLKTAGWKRRIGSPMIDLQTVVKFLVYYAGDLANVFFIITVGTGLYWLIFF

SEQ ID NO: 13483 - protein, 173 aa, Homo Sapiens
  misc_feature (1)..(1): Xaa can be any naturally occurring amino acid
XRGGAGVAMAVWSLLSARAVTAFLLLFLPRFLQAQTFSFPFQQPEKCDNNQYFDISALSCVPCGANQRQDARGTSCVCLPGFQMISNNGGPAIICKKCPENMKGVTEDGWNCISCPSDLTAEGKCHCPIGHILVERDINGTLLSQATCELCDGNENSFMVVNALGDRQGDYVS

SEQ ID NO: 13484 - protein, 87 aa, Homo Sapiens
  misc_feature (1)..(1): Xaa can be any naturally occurring amino acid
XTRGGAGVAMAVWSLLSARAVTAFLLLFLPRFLQAQTFSFPFQQPEKCDNNQYFDISALSCVPCGANQRQDARERCYRRWLELHFLP

SEQ ID NO: 13485 - protein, 107 aa, Homo Sapiens
MLFLALGSPWAVELPLCGRRTALCAAAALRGPRASVSRASSSSGPSGPVAGWSTGPSGAARLLRRPGRAQIPVYWEGYVRFLNTPSDKSEDGRLIYTGNMARAVFGK

SEQ ID NO: 13486 - protein, 260 aa, Homo Sapiens
MLFLALGSPWAVELPLCGRRTALCAAAALRGPRASVSRASSSSGPSGPVAGWSTGPSGAARLLRRPGRAQIPVYWEGYVRFLNTPSDKSEDGRLIYTGNMARAVFGVKCFSYSTSLIGLTFLPYIFTQNNAISESVPLPIQIIFYGIMGSFTVITPVLLHFITKGYVIRLYHEATTDTYKAITYNAMLAETSTVFHQNDVKIPDAKHVFTTFYAKTKSLLVNPVLFPNREDYIHLMGYDKEEFILYMEETSEEKRHKDDK

SEQ ID NO: 13487 - protein, 111 aa, Homo Sapiens
MLFLALGSPWAVELPLCGRRTALCAAAALRGPRASVSRASSSSGPSGPVAGWSTGPSGAARLLRRPGRAQIPVYWEGYVRFLNTPSDKSEDGRLIYTGNMARAVFGWSAVA

SEQ ID NO: 13488 - protein, 555 aa, Homo Sapiens
MAAAAWLQVLPVILLLLGAHPSPLSFFSAGPATVAAADRSKWHIPIPSGKNYFSFGKILFRNTTIFLKFDGEPCDLSLNITWYLKSADCYNEIYNFKAEEVELYLEKLKEKRGLSGKYQTSSKLFQNCSELFKTQTFSGDFMHRLPLLGEKQEAKENGTNLTFIGDKTAMHEPLQTWQDAPYIFIVHIGISSSKESSKENSLSNLFTMTVEVKGPYEYLTLEDYPLMIFFMVMCIVYVLFGVLWLAWSACYWRDLLRIQFWIGAVIFLGMLEKAVFYAEFQNIRYKGESVQGALILAELLSAVKRSLARTLVIIVSLGYGIVKPRLGVTLHKVVVAGALYLLFSGMEGVLRVTGAQTDLASLAFIPLAFLDTALCWWIFISLTQTMKLLKLRRNIVKLSLYRHFTNTLILAVAASIVFIIWTTMKFRIVTCQSDWRELWVDDAIWRLLFSMILFVIMVLWRPSANNQRFAFSPLSEEEEEDEQKEPMLKESFEGMKMRSTKQEPNGNSKVNKAQEDDLKWVEENVPSSVTDVALPALLDSDEERMITHFERSKME

SEQ ID NO: 13489 - protein, 181 aa, Homo Sapiens
MAAAAWLQVLPVILLLLGAHPSPLSFFSAGPATVAAADRSKWHIPIPSGKNYFSFGKILFRNTTIFLKFDGEPCDLSLNITWYLKSADCYNEIYNFKAEEVELYLEKLKEKRGLSGKYQTSSKLFQNCSELFKTQTFSGDFMHRLPLLGEKQEAKENGTNLTFIGDKTIQMPFLKKHFLDC

SEQ ID NO: 13490 - protein, 57 aa, Homo Sapiens
MAAAAWLQVLPVILLLLGAHPSPLSFFSAGPATVAAADRSKWHIPIPSLMENLVTCL

SEQ ID NO: 13491 - protein, 494 aa, Homo Sapiens
MAHSDTVVDGEPCDLSLNITWYLKSADCYNEIYNFKAEEVELYLEKLKEKRGLSGKYQTSSKLFQNCSELFKTQTFSGDFMHRLPLLGEKQEAKENGTNLTFIGDKTAMHEPLQTWQDAPYIFIVHIGISSSKESSKENSLSNLFTMTVEVKGPYEYLTLEDYPLMIFFMVMCIVYVLFGVLWLAWSACYWRDLLRIQFWIGAVIFLGMLEKAVFYAEFQNIRYKGESVQGALILAELLSAVKRSLARTLVIIVSLGYGIVKPRLGVTLHKVVVAGALYLLFSGMEGVLRVTGAQTDLASLAFIPLAFLDTALCWWIFISLTQTMKLLKLRRNIVKLSLYRHFTNTLILAVAASIVFIIWTTMKFRIVTCQSDWRELWVDDAIWRLLFSMILFVIMVLWRPSANNQRFAFSPLSEEEEEDEQKEPMLKESFEGMKMRSTKQEPNGNSKVNKAQEDDLKWVEENVPSSVTDVALPALLDSDEERMITHFERSKME

SEQ ID NO: 13492 - protein, 39 aa, Homo Sapiens
MHRLPLLGEKQEAKENGTNLTFIGDKTAMHEPLQTWQDA

SEQ ID NO: 13493 - protein, 110 aa, Homo Sapiens
MHRLPLLGEKQEAKENGTNLTFIGDKTAMHEPLQTWQDAPYIFIVHIGISSSKESSKENSLSNLFTMTVEVKGPYEYLTLEDYPLMIFFMVMCIVYVLFGVLWLAWSACY

SEQ ID NO: 13494 - protein, 170 aa, Homo Sapiens
MHRLPLLGEKQEAKENGTNLTFIGDKTAMHEPLQTWQDAPYIFIVHIGISSSKESSKENSLSNLFTMTVEVKGPYEYLTLEDYPLMIFFMVMCIVYVLFGVLWLAWSACYWRDLLRIQFWIGAVIFLGMLEKAVFYAEFQNIRYKGESVQGALILAELLSAVKRSLARTL

SEQ ID NO: 13495 - protein, 88 aa, Homo Sapiens [sequence omitted]

SEQ ID NO: 13496 - protein, 40 aa, Homo Sapiens
MHRLPLLGEKQEAKENGTNLTFIGDKTIQMPFLKKHFLDC

SEQ ID NO: 13497 - protein, 195 aa, Homo Sapiens
  misc_feature (1)..(1): Xaa can be any naturally occurring amino acid
XFYAEFQNIRYKGESVQGALILAELLSAVKRSLARTLVIIVSLGYGIVKPRLGVTLHKVVVAGALYLLFSGMEGVLRVTGYFSYPLTLIVNLALSAIDACVILWIFISLTQTMKLLKLRRNIVKLSLYRHFTNTLILAVAASIVFIIWTTMKFRIVTCQSDWRELWVDDAIWRLLFSMILFVIMVLWRPSANNQR

SEQ ID NO: 13498 - protein, 256 aa, Homo Sapiens
EMLRCIWGHFLRVLGGTSPTLSHSSSLLHSLGSVTVLCCVDKQGILSWPNPSPETVLFFSGKVEPPHSSHEDLTDGLSTRSFCHPEVEEEPHERDALLAGSLNNTLHLSNEQERGDWPGEAPKPPEPYSHHKAHGRSKHPSGSNVSFSRDTEGGEEEPSKTQPGMESDPYEAEDFVCDYHLEMLSLSQDQQNPSCIQFDDSNWQLHLTSLKPLGLNVLLNLCDASVTERLCRFSDHLCNIALQESHSAVLPVHVPW

SEQ ID NO: 13499 - protein, 57 aa, Homo Sapiens
MDLKEKHLGEPPSALGLSTRKALSVLKEQLEAVLEGHLRERKKCLTWKEVWRSSFLH

SEQ ID NO: 13500 - protein, 121 aa, Homo Sapiens
MDLKEKHLGEPPSALGLSTRKALSVLKEQLEAVLEGHLRERKKCLTWKEVWRSSFLHHSNRCSCFHWPGASLMLLAVLLLLGCCGGQPAGSRGVGLVNASALFLLLLLNLVLIGRQDRLKR

SEQ ID NO: 13501 - protein, 125 aa, Homo Sapiens
MDLKEKHLGEPPSALGLSTRKALSVLKEQLEAVLEGHLRERKKCLTWKEVWRSSFLHHSNRCSCFHWPGASLMLLAVLLLLGCCGGQPAGSRGVGLVNASALFLLLLLNLVLIGRQDRLKRREVE

SEQ ID NO: 13502 - protein, 1356 aa, Homo Sapiens
MDLKEKHLGEPPSALGLSTRKALSVLKEQLEAVLEGHLRERKKCLTWKEVWRSSFLHHSNRCSCFHWPGASLMLLAVLLLLGCCGGQPAGSRGVGLVNASALFLLLLLNLVLIGRQDRLKRREVERRLRGIIDQIQDALRDGREIQWPSAMYPDLHMPFAPSWSLHWAYRDGHLVNLPVSLLVEGDIIALRPGQESFASLRGIKDDEHIVLEPGDLFPPFSPPPSPRGEVERGPQSPQQHRLFRVLETPVIDNIRWCLDMALSRPVTALDNERFTVQSVMLHYAVPVVLAGFLITNALRFIFSAPGVTSWQYTLLQLQVNGVLPILPLLFPVLWVLATACGEARVLAQMSKASPSSLLAKFSEDTLSSYTEAVSSQEMLRCIWGHFLRVLGGTSPTLSHSSSLLHSLGSVTVLCCVDKQGILSWPNPSPETVLFFSGKVEPPHSSHEDLTDGLSTRSFCHPEPHERDALLAGSLNNTLHLSNEQERGDWPGEAPKPPEPYSHHKAHGRSKHPSGSNVSFSRDTEGGEEEPSKTQPGMESDPYEAEDFVCDYHLEMLSLSQDQQNPSCIQFDDSNWQLHLTSLKPLGLNVLLNLCDASVTERLCRFSDHLCNIALQESHSAVLPVHVPWGLCELARLIGFTPGAKELFKQENHLALYRLPSAETMKETSLGRLSCVTKRRPPLSHMISLFIKDTTTSTEQMLSHGTADVVLEACTDFWDGADIYPLSGSDRKKVLDFYQRACLSGYCSAFAYKPMNCALSSQLNGKCIELVQVPGQSSIFTMCELPSTIPIKQNARRSSWSSDEGIGEVLEKEDCMQALSGQIFMGMVSSQYQARLDIVRLIDGLVNACIRFVYFSLEDELKSKVFAEKMGLETGWNCHISLTPNGDMPGSEIPPSSPSHAGSLHDDLNQVSRDDAEGLLLMEEEGHSDLISFQPTDSDIPSFLEDSNRAKLPRGIHQVRPHLQNIDNVPLLVPLFTDCTPETMCEMIKIMQEYGEVTCCLGSSANLRNSCLFLQSDISIALDPLYPSRCSWETFGYATSISMAQASDGLSPLQLSGQLNSLPCSLTFRQEETISIIRLIEQARHATYGIRKCFLFLLQCQLTLVVIQFLSCLVQLPPLLSTTDILWLSCFCYPLLSISLLGKPPHSSIMSMATGKNLQSIPKKTQHYFLLCFLLKFSLTISSCLICFGFTLQSFCDSSRDRNLTNCSSVMLPSNDDRAPAWFEDFANGLLSAQKLTAALIVLHTVFISITHVHRTKPLWRKSPLTNLWWAVTVPVVLLGQVVQTAVDLQLWTHRDSHVHFGLEDVPLLTWLLGCLSLVLVVVTNEIVKLHEIRVRVRYQKRQKLQFETKLGMNSPF

SEQ ID NO: 13503 - protein, 1007 aa, Homo Sapiens [sequence omitted]

SEQ ID NO: 13504 - protein, 162 aa, Homo Sapiens
MLFKQAELWMPHQGKGNKGEPPSALGLSTRKALSVLKEQLEAVLEGHLRERKKCLTWKEVWRSSFLHHSNRCSCFHWPGASLMLLAVLLLLGCCGGQPAGSRGVGLVNASALFLLLLLNLVLIGRQDRLKRREVERRLRGIIDQIQASSLPPHSDAETTHQS

SEQ ID NO: 13505 - protein, 1366 aa, Homo Sapiens
MLFKQAELWMPHQGKGNKGEPPSALGLSTRKALSVLKEQLEAVLEGHLRERKKCLTWKEVWRSSFLHHSNRCSCFHWPGASLMLLAVLLLLGCCGGQPAGSRGVGLVNASALFLLLLLNLVLIGRQDRLKRREVERRLRGIIDQIQDALRDGREIQWPSAMYPDLHMPFAPSWSLHWAYRDGHLVNLPVSLLVEGDIIALRPGQESFASLRGIKDDEHIVLEPGDLFPPFSPPPSPRGEVERGPQSPQQHRLFRVLETPVIDNIRWCLDMALSRPVTALDNERFTVQSVMLHYAVPVVLAGFLITNALRFIFSAPGVTSWQYTLLQLQVNGVLPILPLLFPVLWVLATACGEARVLAQMSKASPSSLLAKFSEDTLSSYTEAVSSQEMLRCIWGHFLRVLGGTSPTLSHSSSLLHSLGSVTVLCCVDKQGILSWPNPSPETVLFFSGKVEPPHSSHEDLTDGLSTRSFCHPEPHERDALLAGSLNNTLHLSNEQERGDWPGEAPKPPEPYSHHKAHGRSKHPSGSNVSFSRDTEGGEEEPSKTQPGMESDPYEAEDFVCDYHLEMLSLSQDQQNPSCIQFDDSNWQLHLTSLKPLGLNVLLNLCDASVTERLCRFSDHLCNIALQESHSAVLPVHVPWGLCELARLIGFTPGAKELFKQENHLALYRLPSAETMKETSLGRLSCVTKRRPPLSHMISLFIKDTTTSTEQMLSHGTADVVLEACTDFWDGADIYPLSGSDRKKVLDFYQRACLSGYCSAFAYKPMNCALSSQLNGKCIELVQVPGQSSIFTMCELPSTIPIKQNARRSSWSSDEGIGEVLEKEDCMQALSGQIFMGMVSSQYQARLDIVRLIDGLVNACIRFVYFSLEDELKSKVFAEKMGLETGWNCHISLTPNGDMPGSEIPPSSPSHAGSLHDDLNQVSRDDAEGLLLMEEEGHSDLISFQPTDSDIPSFLEDSNRAKLPRGIHQVRPHLQNIDNVPLLVPLFTDCTPETMCEMIKIMQEYGEVTCCLGSSANLRNSCLFLQSDISIALDPLYPSRCSWETFGYATSISMAQASDGLSPLQLSGQLNSLPCSLTFRQEETISIIRLIEQARHATYGIRKCFLFLLQCQLTLVVIQFLSCLVQLPPLLSTTDILWLSCFCYPLLSISLLGKPPHSSIMSMATGKNLQSIPKKTQHYFLLCFLLKFSLTISSCLICFGFTLQSFCDSSRDRNLTNCSSVMLPSNDDRAPAWFEDFANGLLSAQKLTAALIVLHTVFISITHVHRTKPLWRKSPLTNLWWAVTVPVVLLGQVVQTAVDLQLWTHRDSHVHFGLEDVPLLTWLLGCLSLVLVVVTNEIVKLHEIRVRVRYQKRQKLQFETKLGMNSPF

SEQ ID NO: 13506 - protein, 35 aa, Homo Sapiens
MLLAVLLLLGCCGGQPAGSRGVGLVNASALFLLLL

SEQ ID NO: 13507 - protein, 89 aa, Homo Sapiens
MSKASPSSLLAKFSEDTLSSYTEAVSSQEMLRCIWGHFLRVLGGTSPTLSHSSSLLHSLGSVTVLCCVDKQGILSWPNPSPETVLFFSG

SEQ ID NO: 13508 - protein, 128 aa, Homo Sapiens
PHSSIMSMATGKNLQSIPKKTQHYFLLCFLLKFSLTISSCLICFGFTLQSFCDSSRDRNLTNCSSVMLPRAPAWFEDFANGLLSAQKLTAALIVLHTVFISITHVHRTKPLWRKSPLTNLWWAVTVPV

SEQ ID NO: 13509 - protein, 302 aa, Homo Sapiens
  misc_feature (1)..(1): Xaa can be any naturally occurring amino acid
XGKVEPPHSSHEDLTDGLSTRSFCHPEPHERDALLAGSLNNTLHLSNEQERGDWPGEAPKPPEPYSHHKAHGRSKHPSGSNTQPGMESDPYEAEDFVCDYHLEMLSLSQDQQNPSCIQFDDSNWQLHLTSLKPLGLNVLLNLCDASVTERLCRFSDHLCNIALQESHSAVLPVHVPWGLCELARLIGFTPGAKELFKQENHLALYRLPSAETMKETSLGRLSCVTKRRPPLSHMISLFIKDTTTSTEQMLSHGTADVVLEACTDFWDGADIYPLSGSDRKKVLDFYQRACLSGYCSAFAYKP

SEQ ID NO: 13510 - protein, 56 aa, Homo Sapiens
  misc_feature (1)..(1): Xaa can be any naturally occurring amino acid
XLLLNLVLIGRQDRLKRREVERRLRGIIDQIQDGAWTWPCPDQSLPWTMSGSQCSR

SEQ ID NO: 13511 - protein, 73 aa, Homo Sapiens
  misc_feature (1)..(1): Xaa can be any naturally occurring amino acid
XRDALLAGSLNNTLHLSNEQERGDWPGEAPKPPEPYSHHKAHGRSKHPSGSNVSFSRDTEGGEEEPSKLLPVS

SEQ ID NO: 13512 - protein, 176 aa, Homo Sapiens
  misc_feature (1)..(1): Xaa can be any naturally occurring amino acid
XWLSCFCYPLLSISLLGKPPHSSIMSMATGKNLQSIPKKSFCDSSRDRNLTNCSSVMLPSNDDRAPAWFEDFANGLLSAQKLTAALIVLHTVFISITHVHRTKPLWRKSPLTNLWWAVTVPVVLLGQVVQTAVDLQLWTHRDSHVHFGLEDVPLLTWLLGCLSLVLVVVTNEIVKL

SEQ ID NO: 13513 - protein, 295 aa, Homo Sapiens
YATSISMAQASDGLSPLQLSGQLNSLPCSLTFRQEETISIIRLIEQFLSCLVQLPPLLSTTDILWLSCFCYPLLSISLLGKPPHSSIMSMATGKNLQSIPKKTQHYFLLCFLLKFSLTISSCLICFGFTLQSFCDSSRDRNLTNCSSVMLPSNDDRAPAWFEDFANGLLSAQKLTAALIVLHTVFISITHVHRTKPLWRKSPLTNLWWAVTVPVVLLGQVVQTAVDLQLWTHRDSHVHFGLEDVPLLTWLLGCLSLVLVVVTNEIVKLHEIRVRVRYQKRQKLQFETKLGMNSPF

SEQ ID NO: 13514 - protein, 184 aa, Homo Sapiens
MWRLALGGVFLAAAQACVFCRLPAHDLSGRLARLCSQMEARQKECGASPDFSAFALDEVSMNKVTEKTHRVLRVMEIKEAVSSLPSYWSWLRKTKLPEYTREALCPPACPLPLLSPAGGSTTLYNCSTCKGTEVSCWPRKRCFPGSQDLWEAKILLLSIFGAFLLLGVLSLLVESHHLQAKSGL

SEQ ID NO: 13515 - protein, 203 aa, Homo Sapiens
MWRLALGGVFLAAAQACVFCRLPAHDLSGRLARLCSQMEARQKECGASPDFSAFALDEVSMNKVTEKTHRVLRVMEIKEAVSSLPSYWSWLRKTKLPEYTREALCPPACRGSTTLYNCSTCKGTEVSCWPRKRCFPGSLGSQDSAPLHLRSFPASGCSEPPGGVPPPPSKKWLVKTLKTSQPPALRGMHSQLPHPLEGNQSAP

SEQ ID NO: 13516 - protein, 176 aa, Homo Sapiens
MWRLALGGVFLAAAQACVFCRLPAHDLSGRLARLCSQMEARQKECGASPDFSAFALDEVSMNKVTEKTHRVLRVMEIKEAVSSLPSYWSWLRKTKLPEYTREALCPPACRGSTTLYNCSTCKGTEVSCWPRKRCFPGSQDLWEAKILLLSIFGAFLLLGVLSLLVESHHLQAKSGL

SEQ ID NO: 13517 - protein, 218 aa, Homo Sapiens
MAWKSSVIMQMGRFLLLVILFLPREMTSSVLTVNGKTENYILDTTPGSQASLICAVQNHTREEELLWYREEGRVDLKSGNKINSSSVCVSSISENDNGISFTCRLGRDQSVSVSVVLNVTFPPLLSGNDFQTVEEGSNVKLVCNVKANPQAQMMWYKNSSLLDLEKSRHQIQQTSESFQLSITKVEKPDNGTYSCIAKSSLKTESLDFHLIVKALHEG

SEQ ID NO: 13518 - protein, 262 aa, Homo Sapiens
MAWKSSVIMQMGRFLLLVILFLPREMTSSVLTVNGKTENYILDTTPGSQASLICAVQNHTREEELLWYREEGRVDLKSGNKINSSSVCVSSISENDNGISFTCRLGRDQSVSVSVVLNVTFPPLLSGNDFQTVEEGSNVKLVCNVKANPQAQMMWYKNSSLLDLEKSRHQIQQTSESFQLSITKVEKPDNGTYSCIAKSSLKTESLDFHLIVKDKTVGVPIEPIIAACVVIFLTLCFGLIARRKKIMKLCMKDKDPHSETAL

SEQ ID NO: 13519 - protein, 348 aa, Homo Sapiens
MRLGLLSVALLFVGSSHLYSDHYSPSGRHRLGPSPEPAASSQQAEAVRKRLRRRREGGAHAEDCGTAPLKDVLQGSRIIGGTEAQAGAWPWVVSLQIKYGRVLVHVCGGTLVRERWVLTAAHCTKDASDPLMWTAVIGTNNIHGRYPHTKKIKIKAIIIHPNFILESYVNDIALFHLKKAVRYNDYIQPICLPFDVFQILDGNTKCFISGWGRTKEEGNATNILQDAEVHYISREMCNSERSYGGIIPNTSFCAGDEDGAFDTCRGDSGGPLMCYLPEYKRFFVMGITSYGHGCGRRGFPGVYIGPSFYQKWLTEHFFHASTQGILTINILRGQILIALCFVILLATT

SEQ ID NO: 13520 - protein, 320 aa, Homo Sapiens
MRLGLLSVALLFVGSSHLYSDHYSPSGRHRLGPSPEPAASSQQAEAVRKRLRRRREGGAHAEDCGTAPLKDVLQGSRIIGGTEAQAGAWPWVVSLQIKYGRVLVHVCGGTLVRERWVLTAAHCTKDASDPLMWTAVIGTNNIHGRYPHTKKIKIKAIIIHPNFILESYVNDIALFHLKKAVRYNDYIQPICLPFDVFQILDGNTKCFISGWGRTKEEGNATNILQDAEVHYISREMCNSERSYGGIIPNTSFCAGDEDGAFDTCRVRPSNFPLKYFLKPEGNLSNKAFDNFLVVLIIRPKNNKSFFLLFNYFNNPNLLGS

SEQ ID NO: 13521 - protein, 10 aa, Homo Sapiens
MHSFRLARLS

SEQ ID NO: 13522 - protein, 17 aa, Homo Sapiens
MHSFRLARLSSWRVHAG

SEQ ID NO: 13523 - protein, 147 aa, Homo Sapiens
MHSFRLARLSSWRVHAGLVSHSAVRPHQGALVERIIPHPLYSAQNHDYDVALLRLQTALNFSDTVGAVCLPAKEQHFPKGSRCWVSGWGHTHPSHTYSSDMLQDTVVPLFSTQLCNSSCVYSGALTPRMLCAGYLDGRADACQDSLL

SEQ ID NO: 13524 - protein, 198 aa, Homo Sapiens
MHSFRLARLSSWRVHAGLVSHSAVRPHQGALVERIIPHPLYSAQNHDYDVALLRLQTALNFSDTVGAVCLPAKEQHFPKGSRCWVSGWGHTHPSHTYSSDMLQDTVVPLFSTQLCNSSCVYSGALTPRMLCAGYLDGRADACQGDSGGPLVCPDGDTWRLVGVVSWGRGCAEPNHPGVYAKVAEFLDWIHDTAQDSLL

SEQ ID NO: 13525 - protein, 413 aa, Homo Sapiens
MRRGCAVLGALGLLAGAGVGSWLLVLYLCPAASQPISGTLQDEEITLSCSEASAEEALLPALPKTVSFRINSEDFLLEAQVRDQPRWLLVCHEGWSPALGLQICWSLGHLRLTHHKGVNLTDIKLNSSQEFAQLSPRLGGFLEEAWQPRNNCTSGQVVSLRCSECGARPLASRIVGGQSVAPGRWPWQASVALGFRHTCGGSVLAPRWVVTAAHCMHSFRLARLSSWRVHAGLVSHSAVRPHQGALVERIIPHPLYSAQNHDYDVALLRLQTALNFSDTVGAVCLPAKEQHFPKGSRCWVSGWGHTHPSHTYSSDMLQDTVVPLFSTQLCNSSCVYSGALTPRMLCAGYLDGRADACQGDSGGPLVCPDGDTWRLVGVVSWGRGCAEPNHPGVYAKVAEFLDWIHDTAQDSLL

SEQ ID NO: 13526 - protein, 344 aa, Homo Sapiens
MRRGCAVLGALGLLAGAGVGSWLLVLYLCPAASQPISGTLQDEEITLSCSEASAEEALLPALPKTVSFRINSEDFLLEAQVRDQPRWLLVCHEGWSPALGLQICWSLGHLRLTHHKGVNLTDIKLNSSQEFAQLSPRLGGFLEEAWQPSFRLARLSSWRVHAGLVSHSAVRPHQGALVERIIPHPLYSAQNHDYDVALLRLQTALNFSDTVGAVCLPAKEQHFPKGSRCWVSGWGHTHPSHTYSSDMLQDTVVPLFSTQLCNSSCVYSGALTPRMLCAGYLDGRADACQGDSGGPLVCPDGDTWRLVGVVSWGRGCAEPNHPGVYAKVAEFLDWIHDTAQDSLL

SEQ ID NO: 13527 - protein, 457 aa, Homo Sapiens
MSLMLDDQPPMEAQYAEEGPGPGIFRAEPGDQQHPISQAVCWRSMRRGCAVLGALGLLAGAGVGSWLLVLYLCPAASQPISGTLQDEEITLSCSEASAEEALLPALPKTVSFRINSEDFLLEAQVRDQPRWLLVCHEGWSPALGLQICWSLGHLRLTHHKGVNLTDIKLNSSQEFAQLSPRLGGFLEEAWQPRNNCTSGQVVSLRCSECGARPLASRIVGGQSVAPGRWPWQASVALGFRHTCGGSVLAPRWVVTAAHCMHSFRLARLSSWRVHAGLVSHSAVRPHQGALVERIIPHPLYSAQNHDYDVALLRLQTALNFSDTVGAVCLPAKEQHFPKGSRCWVSGWGHTHPSHTYSSDMLQDTVVPLFSTQLCNSSCVYSGALTPRMLCAGYLDGRADACQGDSGGPLVCPDGDTWRLVGVVSWGRGCAEPNHPGVYAKVAEFLDWIHDTAQDSLL

SEQ ID NO: 13528 - protein, 457 aa, Homo Sapiens; identical to SEQ ID NO: 13527

SEQ ID NO: 13529 - protein, 388 aa, Homo Sapiens
MSLMLDDQPPMEAQYAEEGPGPGIFRAEPGDQQHPISQAVCWRSMRRGCAVLGALGLLAGAGVGSWLLVLYLCPAASQPISGTLQDEEITLSCSEASAEEALLPALPKTVSFRINSEDFLLEAQVRDQPRWLLVCHEGWSPALGLQICWSLGHLRLTHHKGVNLTDIKLNSSQEFAQLSPRLGGFLEEAWQPSFRLARLSSWRVHAGLVSHSAVRPHQGALVERIIPHPLYSAQNHDYDVALLRLQTALNFSDTVGAVCLPAKEQHFPKGSRCWVSGWGHTHPSHTYSSDMLQDTVVPLFSTQLCNSSCVYSGALTPRMLCAGYLDGRADACQGDSGGPLVCPDGDTWRLVGVVSWGRGCAEPNHPGVYAKVAEFLDWIHDTAQDSLL

SEQ ID NO: 13530 - protein, 44 aa, Homo Sapiens
MSLMLDDQPPMEAQYAEEGPGPGIFRAEPGDQQHPSRPDWAIGE

SEQ ID NO: 13531 - protein, 44 aa, Homo Sapiens; identical to SEQ ID NO: 13530

SEQ ID NO: 13532 - protein, 448 aa, Homo Sapiens
MTGWGQWRAIILHSPDPPWGQPHMIDVSQAVCWRSMRRGCAVLGALGLLAGAGVGSWLLVLYLCPAASQPISGTLQDEEITLSCSEASAEEALLPALPKTVSFRINSEDFLLEAQVRDQPRWLLVCHEGWSPALGLQICWSLGHLRLTHHKGVNLTDIKLNSSQEFAQLSPRLGGFLEEAWQPRNNCTSGQVVSLRCSECGARPLASRIVGGQSVAPGRWPWQASVALGFRHTCGGSVLAPRWVVTAAHCMHSFRLARLSSWRVHAGLVSHSAVRPHQGALVERIIPHPLYSAQNHDYDVALLRLQTALNFSDTVGAVCLPAKEQHFPKGSRCWVSGWGHTHPSHTYSSDMLQDTVVPLFSTQLCNSSCVYSGALTPRMLCAGYLDGRADACQGDSGGPLVCPDGDTWRLVGVVSWGRGCAEPNHPGVYAKVAEFLDWIHDTAQDSLL

SEQ ID NO: 13533 - protein, 152 aa, Homo Sapiens
MTLIEGVGDEVTVLFSVLACLLVLALAWVSTHTAEGGDPLPQPSGTPTPSQPSAAMAATDSMRGEAPGAETPSLRHRGQAAQPEPSTGFTATPPAPDSPQEPLVLRLKFLNDSEQVARAWPHDTIGSLKRTQFPGREQQVRLIYQGQLLGDD

SEQ ID NO: 13534 - protein, 171 aa, Homo Sapiens
MTLIEGVGDEVTVLFSVLACLLVLALAWVSTHTAEGGDPLPQPSGTPTPSQPSAAMAATDSMRGEAPGAETPSLRHRGQAAQPEPSTGFTATPPAPDSPQEPLVLRLKFLNDSEQVARAWPHDTIGSLKRTQFPGREQQVRLIYQGQLLGDDTQTLGSLHLPPNCVLHCHV

SEQ ID NO: 13535 - protein, 246 aa, Homo Sapiens
MTLIEGVGDEVTVLFSVLACLLVLALAWVSTHTAEGGDPLPQPSGTPTPSQPSAAMAATDSMRGEAPGAETPSLRHRGQAAQPEPSTGFTATPPAPDSPQEPLVLRLKFLNDSEQVARAWPHDTIGSLKRTQFPGREQQVRLIYQGQLLGDDTQTLGSLHLPPNCVLHCHVSTRVGPPNPPCPPGSEPGPSGLEIGSLLLPLLLLLLLLLWYCQIQYRPFFPLTATLGLAGFTLLLSLLAFAMYRP

SEQ ID NO: 13536 - protein, 246 aa, Homo Sapiens; identical to SEQ ID NO: 13535

SEQ ID NO: 13537 - protein, 246 aa, Homo Sapiens; identical to SEQ ID NO: 13535

SEQ ID NO: 13538 - protein, 246 aa, Homo Sapiens; identical to SEQ ID NO: 13535

SEQ ID NO: 13539 - protein, 246 aa, Homo Sapiens; identical to SEQ ID NO: 13535

SEQ ID NO: 13540 - protein, 296 aa, Homo Sapiens
MAVLAPLIALVYSVPRLSRWLAQPYYLLSALLSAAFLLVRKLPPLCHGLPTQREDGNPCDFDWREVEILMFLSAIVMMKNRRSITVEQHIGNIFMFSKVANTILFFRLDIRMGLLYITLCIVFLMTCKPPLYMGPEYIKYFNDKTIDEELERDKRVTWIVEFFANWSNDCQSFAPIYADLSLKYNCTGLNFGKVDVGRYTDVSTRYKVSTSPLTKQLPTLILFQGGKEAMRRPQIDKKGRAVSWTFSEENVIREFNLNELYQRAKKLSKAGDNIPEEQPVASTPTTVSDGENKKDK

SEQ ID NO: 13541 - protein, 258 aa, Homo Sapiens
MAVLAPLIALVYSVPRLSRWLAQPYYLLSALLSAAFLLVRKLPPLCHGLPTQREDGNPCDFDWREVEILMFLSAIVMMKNRRSMFLMTCKPPLYMGPEYIKYFNDKTIDEELERDKRVTWIVEFFANWSNDCQSFAPIYADLSLKYNCTGLNFGKVDVGRYTDVSTRYKVSTSPLTKQLPTLILFQGGKEAMRRPQIDKKGRAVSWTFSEENVIREFNLNELYQRAKKLSKAGDNIPEEQPVASTPTTVSDGENKKDK

SEQ ID NO: 13542 - protein, 115 aa, Homo Sapiens
MAVLAPLIALVYSVPRLSRWLAQPYYLLSALLSAAFLLVRKLPPLCHGLPTQREDGNPCDFDWREVEILMFLSAIVMMKNRRSMPHEEGQRMGYRSAQPSLTCDISVFQSLWSNI

SEQ ID NO: 13543 - protein, 115 aa, Homo Sapiens; identical to SEQ ID NO: 13542

SEQ ID NO: 13544 - protein, 103 aa, Homo Sapiens
MAVLAPLIALVYSVPRLSRWLAQPYYLLSALLSAAFLLVRKLPPLCHGLPTQREDGNPCDFDWREVEILMFLSAIVMMKNRRSRGTRTGQEGHLDCGVLCQLV

SEQ ID NO: 13545 - protein, 103 aa, Homo Sapiens; identical to SEQ ID NO: 13544

SEQ ID NO: 13546 - protein, 84 aa, Homo Sapiens
MAVLAPLIALVYSVPRLSRWLAQPYYLLSALLSAAFLLVRKLPPLCHGLPTQREDGNPCDFDWREVEILMFLSAIVMMKNRRSS

SEQ ID NO: 13547 - protein, 86 aa, Homo Sapiens
MAVLAPLIALVYSVPRLSRWLAQPYYLLSALLSAAFLLVRKLPPLCHGLPTQREDGNPCDFDWREVEILMFLSAIVMMKNRRSSTK

SEQ ID NO: 13548 - protein, 63 aa, Homo Sapiens
MAAWKSWTALRLCATVVVLDMVVCKGFVEDLDESFKENRNDDIWLVDALLQSLEFEVIQQLSY

SEQ ID NO: 13549 - protein, 89 aa, Homo Sapiens
MAAWKSWTALRLCATVVVLDMVVCKGFVEDLDESFKENRNDDIWLVDFYAPWCGHCKKLEPIWNEVGLEMKSIGSPVKVGKMDATSYSN

SEQ ID NO: 13550 - protein, 89 aa, Homo Sapiens; identical to SEQ ID NO: 13549

SEQ ID NO: 13551 - protein, 197 aa, Homo Sapiens
MAAWKSWTALRLCATVVVLDMVVCKGFVEDLDESFKENRNDDIWLVDFYAPWCGHCKKLEPIWNEVGLEMKSIGSPVKVGKMDATSYSSIASEFGVRGYPTIKLALIRPLPSQQMFEHMQKRHRVFFVYVGGESPLKEKYIDAASELIVYTYFFSASEEVVPEYVTLKEMPAVLVFKDETYFVYDGKFQIFNSCKTF

SEQ ID NO: 13552 - protein, 195 aa, Homo Sapiens
MAAWKSWTALRLCATVVVLDMVVCKGFVEDLDESFKENRNDDIWLVDFYAPWCGHCKKLEPIWNEVGLEMKSIGSPVKVGKMDATSYSSIASEFGVRGYPTIKLLKGDLAYNYRGPRTKDDIIEFAHRVSGALIRPLPSQQMFEHMQKRHRVFFVYVGGESPLKEKYIDAASELIVYTYFFSASEEVVPEVIFKI

SEQ ID NO: 13553 - protein, 454 aa, Homo Sapiens
MAAWKSWTALRLCATVVVLDMVVCKGFVEDLDESFKENRNDDIWLVDFYAPWCGHCKKLEPIWNEVGLEMKSIGSPVKVGKMDATSYSSIASEFGVRGYPTIKLLKGDLAYNYRGPRTKDDIIEFAHRVSGALIRPLPSQQMFEHMQKRHRVFFVYVGGESPLKEKYIDAASELIVYTYFFSASEEVVPEYVTLKEMPAVLVFKDETYFVYDEYEDGDLSSWINRERFQNYLAMDGFLLYELGDTGKLVALAVIDEKNTSVEHTRLKSIIQEVARDYRDLFHRDFQFGHMDGNDYINTLLMDELTVPTVVVLNTSNQQYFLLDRQIKNVEDMVQFINNILDGTVEAQGGDSILQRLKRIVFDAKSTIVSIFKSSPLMGCFLFGLPLGVISIMCYGIYTADTDGGYIEERYEVSKSENENQEQIEESKEQQEPSSGGSVVPTVQEPKDVLEKKKD

SEQ ID NO: 13554 - protein, 128 aa, Homo Sapiens
MAAWKSWTALRLCATVVVLDMVVCKGFVEDLDESFKENRNDDIWLVDFYAPWCGHCKKLEPIWNEVGLEMKSIGSPVKVGKMDATSYSSIASEFGVRGYPTIKLRFPGGLKIGVWPFFIGEIKRGLGI

SEQ ID NO: 13555 - protein, 69 aa, Homo Sapiens
MVVCKGFVEDLDESFKENRNDDIWLVDFYAPWCGHCKKLEPIWNEVGLEMKSIGSPVKVGKMDATSYSN

SEQ ID NO: 13556 - protein, 23 aa, Homo Sapiens
ASTEAEPEVDNLLVSDATPDGFR

SEQ ID NO: 13557 - protein, 92 aa, Homo Sapiens
MGAMTQLLAGVFLAFLALATEGGVLKKVIRHKRQSGVNATLPEENQPVVFNHVYNIKLPVGSQCSVDLESASGEKDLAPPSEPSESFQEHTV

SEQ ID NO: 13558 - protein, 2019 aa, Homo Sapiens
MGAMTQLLAGVFLAFLALATEGGVLKKVIRHKRQSGVNATLPEENQPVVFNHVYNIKLPVGSQCSVDLESASGEKDLAPPSEPSESFQEHTVDGENQIVFTHRINIPRRACGCAAAPDVKELLSRLEELENLVSSLREQCTAGAGCCLQPATGRLDTRPFCSGRGNFSTEGCGCVCEPGWKGPNCSEPECPGNCHLRGRCIDGQCICDDGFTGEDCSQLACPSDCNDQGKCVNGVCICFEGYAGADCSREICPVPCSEEHGTCVDGLCVCHDGFAGDDCNKPLCLNNCYNRGRCVENECVCDEGFTGEDCSELICPNDCFDRGRCINGTCYCEEGFTGEDCGKPTCPHACHTQGRCEEGQCVCDEGFAGVDCSEKRCPADCHNRGRCVDGRCECDDGFTGADCGELKCPNGCSGHGRCVNGQCVCDEGYTGEDCSQLRCPNDCHSRGRCVEGKCVCEQGFKGYDCSDMSCPNDCHQHGRCVNGMCVCDDGYTGEDCRDRQCPRDCSNRGLCVDGQCVCEDGFTGPDCAELSCPNDCHGQGRCVNGQCVCHEGFMGKDCKEQRCPSDCHGQGRCVDGQCICHEGFTGLDCGQHSCPSDCNNLGQCVSGRCICNEGYSGEDCSEVSPPKDLVVTEVTEETVNLAWDNEMRVTEYLVVYTPTHEGGLEMQFRVPGDQTSTIIQELEPGVEYFIRVFAILENKKSIPVSARVATYLPAPEGLKFKSIKETSVEVEWDPLDIAFETWEIIFRNMNKEDEGEITKSLRRPETSYRQTGLAPGQEYEISLHIVKNNTRGPGLKRVTTTRLDAPSQIEVKDVTDTTALITWFKPLAEIDGIELTYGIKDVPGDRTTIDLTEDENQYSIGNLKPDTEYEVSLISRRGDMSSNPAKETFTTGLDAPRNLRRVSQTDNSITLEWRNGKAAIDSYRIKYAPISGGDHAEVDVPKSQQATTKTTLTGLRPGTEYGIGVSAVKEDKESNPATINAATELDTPKDLQVSETAETSLTLLWKTPLAKFDRYRLNYSLPTGQWVGVQLPRNTTSYVLRGLEPGQEYNVLLTAEKGRHKSKPARVKASTEQAPELENLTVTEVGWDGLRLNWTAADQAYEHFIIQVQEANKVEAARNLTVPGSLRAVDIPGLKAATPYTVSIYGVIQGYRTPVLSAEASTGETPNLGEVVVAEVGWDALKLNWTAPEGAYEYFFIQVQEADTVEAAQNLTVPGGLRSTDLPGLKAATHYTITIRGVTQDFSTTPLSVEVLTEDLPQLGDLAVSEVGWDGLRLNWTAADNAYEHFVIQVQEVNKVEAAQNLTLPGSLRAVDIPGLEAATPYRVSIYGVIRGYRTPVLSAEASTAKEPEIGNLNVSDITPESFNLSWMATDGIFETFTIEIIDSNRLLETVEYNISGAERTAHISGLPPSTDFIVYLSGLAPSIRTKTISATATTEAEPEVDNLLVSDATPDGFRLSWTADEGVFDNFVLKIRDTKKQSEPLEITLLAPERTRDITGLREATEYEIELYGISKGRRSQTVSAIATTAMGSPKEVIFSDITENSATVSWRAPTAQVESFRITYVPITGGTPSMVTVDGTKTQTRLVKLIPGVEYLVSIIAMKGFEESEPVSGSFTTALDGPSGLVTANITDSEALARWQPAIATVDSYVISYTGEKVPEITRTVSGNTVEYALTDLEPATEYTLRIFAEKGPQKSSTITAKFTTDLDSPRDLTATEVQSETALLTWRPPRASVTGYLLVYESVDGTVKEVIVGPDTTSYSLADLSPSTHYTAKIQALNGPLRSNMIQTIFTTIGLLYPFPKDCSQAMLNGDTTSGLYTIYLNGDKAEALEVFCDMTSDGGGWIVFLRRKNGRENFYQNWKAYAAGFGDRREEFWLGLDNLNKITAQGQYELRVDLRDHGETAFAVYDKFSVGDAKTRYKLKVEGYSGTAGDSMAYHNGRSFSTFDKDTDSAITNCALSYKGAFWYRNCHRVNLMGRYGDNNHSQGVNWFHWKGHEHSIQFAEMKLRPSNFRNLEGRRKRA

SEQ ID NO: 13559 - protein, 2201 aa, Homo Sapiens
MGAMTQLLAGVFLAFLALATEGGVLKKVIRHKRQSGVNATLPEENQPVVFNHVYNIKLPVGSQCSVDLESASGEKDLAPPSEPSESFQEHTVDGENQIVFTHRINIPRRACGCAAAPDVKELLSRLEELENLVSSLREQCTAGAGCCLQPATGRLDTRPFCSGRGNFSTEGCGCVCEPGWKGPNCSEPECPGNCHLRGRCIDGQCICDDGFTGEDCSQLACPSDCNDQGKCVNGVCICFEGYAGADCSREICPVPCSEEHGTCVDGLCVCHDGFAGDDCNKPLCLNNCYNRGRCVENECVCDEGFTGEDCSELICPNDCFDRGRCINGTCYCEEGFTGEDCGKPTCPHACHTQGRCEEGQCVCDEGFAGVDCSEKRCPADCHNRGRCVDGRCECDDGFTGADCGELKCPNGCSGHGRCVNGQCVCDEGYTGEDCSQLRCPNDCHSRGRCVEGKCVCEQGFKGYDCSDMSCPNDCHQHGRCVNGMCVCDDGYTGEDCRDRQCPRDCSNRGLCVDGQCVCEDGFTGPDCAELSCPNDCHGQGRCVNGQCVCHEGFMGKDCKEQRCPSDCHGQGRCVDGQCICHEGFTGLDCGQHSCPSDCNNLGQCVSGRCICNEGYSGEDCSEVSPPKDLVVTEVTEETVNLAWDNEMRVTEYLVVYTPTHEGGLEMQFRVPGDQTSTIIQELEPGVEYFIRVFAILENKKSIPVSARVATYLPAPEGLKFKSIKETSVEVEWDPLDIAFETWEIIFRNMNKEDEGEITKSLRRPETSYRQTGLAPGQEYEISLHIVKNNTRGPGLKRVTTTRLDAPSQIEVKDVTDTTALITWFKPLAEIDGIELTYGIKDVPGDRTTIDLTEDENQYSIGNLKPDTEYEVSLISRRGDMSSNPAKETFTTGLDAPRNLRRVSQTDNSITLEWRNGKAAIDSYRIKYAPISGGDHAEVDVPKSQQATTKTTLTGLRPGTEYGIGVSAVKEDKESNPATINAATELDTPKDLQVSETAETSLTLLWKTPLAKFDRYRLNYSLPTGQWVGVQLPRNTTSYVLRGLEPGQEYNVLLTAEKGRHKSKPARVKASTEQAPELENLTVTEVGWDGLRLNWTAADQAYEHFIIQVQEANKVEAARNLTVPGSLRAVDIPGLKAATPYTVSIYGVIQGYRTPVLSAEASTGETPNLGEVVVAEVGWDALKLNWTAPEGAYEYFFIQVQEADTVEAAQNLTVPGGLRSTDLPGLKAATHYTITIRGVTQDFSTTPLSVEVLTEEVPDMGNLTVTEVSWDALRLNWTTPDGTYDQFTIQVQEADQVEEAHNLTVPGSLRSMEIPGLRAGTPYTVTLHGEVRGHSTRPLAVEVVTEDLPQLGDLAVSEVGWDGLRLNWTAADNAYEHFVIQVQEVNKVEAAQNLTLPGSLRAVDIPGLEAATPYRVSIYGVIRGYRTPVLSAEASTAKEPEIGNLNVSDITPESFNLSWMATDGIFETFTIEIIDSNRLLETVEYNISGAERTAHISGLPPSTDFIVYLSGLAPSIRTKTISATATTEALPLLENLTISDINPYGFTVSWMASENAFDSFLVTVVDSGKLLDPQEFTLSGTQRKLELRGLITGIGYEVMVSGFTQGHQTKPLRAEIVTEAEPEVDNLLVSDATPDGFRLSWTADEGVFDNFVLKIRDTKKQSEPLEITLLAPERTRDITGLREATEYEIELYGISKGRRSQTVSAIATTAMGSPKEVIFSDITENSATVSWRAPTAQVESFRITYVPITGGTPSMVTVDGTKTQTRLVKLIPGVEYLVSIIAMKGFEESEPVSGSFTTALDGPSGLVTANITDSEALARWQPAIATVDSYVISYTGEKVPEITRTVSGNTVEYALTDLEPATEYTLRIFAEKGPQKSSTITAKFTTDLDSPRDLTATEVQSETALLTWRPPRASVTGYLLVYESVDGTVKEVIVGPDTTSYSLADLSPSTHYTAKIQALNGPLRSNMIQTIFTTIGLLYPFPKDCSQAMLNGDTTSGLYTIYLNGDKAEALEVFCDMTSDGGGWIVFLRRKNGRENFYQNWKAYAAGFGDRREEFWLGLDNLNKITAQGQYELRVDLRDHGETAFAVYDKFSVGDAKTRYKLKVEGYSGTAGDSMAYHNGRSFSTFDKDTDSAITNCALSYKGAFWYRNCHRVNLMGRYGDNNHSQGVNWFHWKGHEHSIQFAEMKLRPSNFRNLEGRRKRA

SEQ ID NO: 13560 - protein, 1928 aa, Homo Sapiens
MGAMTQLLAGVFLAFLALATEGGVLKKVIRHKRQSGVNATLPEENQPVVFNHVYNIKLPVGSQCSVDLESASGEKDLAPPSEPSESFQEHTVDGENQIVFTHRINIPRRACGCAAAPDVKELLSRLEELENLVSSLREQCTAGAGCCLQPATGRLDTRPFCSGRGNFSTEGCGCVCEPGWKGPNCSEPECPGNCHLRGRCIDGQCICDDGFTGEDCSQLACPSDCNDQGKCVNGVCICFEGYAGADCSREICPVPCSEEHGTCVDGLCVCHDGFAGDDCNKPLCLNNCYNRGRCVENECVCDEGFTGEDCSELICPNDCFDRGRCINGTCYCEEGFTGEDCGKPTCPHACHTQGRCEEGQCVCDEGFAGVDCSEKRCPADCHNRGRCVDGRCECDDGFTGADCGELKCPNGCSGHGRCVNGQCVCDEGYTGEDCSQLRCPNDCHSRGRCVEGKCVCEQGFKGYDCSDMSCPNDCHQHGRCVNGMCVCDDGYTGEDCRDRQCPRDCSNRGLCVDGQCVCEDGFTGPDCAELSCPNDCHGQGRCVNGQCVCHEGFMGKDCKEQRCPSDCHGQGRCVDGQCICHEGFTGLDCGQHSCPSDCNNLGQCVSGRCICNEGYSGEDCSEVSPPKDLVVTEVTEETVNLAWDNEMRVTEYLVVYTPTHEGGLEMQFRVPGDQTSTIIQELEPGVEYFIRVFAILENKKSIPVSARVATYLPAPEGLKFKSIKETSVEVEWDPLDIAFETWEIIFRNMNKEDEGEITKSLRRPETSYRQTGLAPGQEYEISLHIVKNNTRGPGLKRVTTTRLDAPSQIEVKDVTDTTALITWFKPLAEIDGIELTYGIKDVPGDRTTIDLTEDENQYSIGNLKPDTEYEVSLISRRGDMSSNPAKETFTTGLDAPRNLRRVSQTDNSITLEWRNGKAAIDSYRIKYAPISGGDHAEVDVPKSQQATTKTTLTGLRPGTEYGIGVSAVKEDKESNPATINAATELDTPKDLQVSETAETSLTLLWKTPLAKFDRYRLNYSLPTGQWVGVQLPRNTTSYVLRGLEPGQEYNVLLTAEKGRHKSKPARVKASTEQAPELENLTVTEVGWDGLRLNWTAADQAYEHFIIQVQEANKVEAARNLTVPGSLRAVDIPGLKAATPYTVSIYGVIQGYRTPVLSAEASTGETPNLGEVVVAEVGWDALKLNWTAPEGAYEYFFIQVQEADTVEAAQNLTVPGGLRSTDLPGLKAATHYTITIRGVTQDFSTTPLSVEVLTEEVPDMGNLTVTEVSWDALRLNWTTPDGTYDQFTIQVQEADQVEEAHNLTVPGSLRSMEIPGLRAGTPYTVTLHGEVRGHSTRPLAVEVVTEDLPQLGDLAVSEVGWDGLRLNWTAADNAYEHFVIQVQEVNKVEAAQNLTLPGSLRAVDIPGLEAATPYRVSIYGVIRGYRTPVLSAEASTAMGSPKEVIFSDITENSATVSWRAPTAQVESFRITYVPITGGTPSMVTVDGTKTQTRLVKLIPGVEYLVSIIAMKGFEESEPVSGSFTTALDGPSGLVTANITDSEALARWQPAIATVDSYVISYTGEKVPEITRTVSGNTVEYALTDLEPATEYTLRIFAEKGPQKSSTITAKFTTDLDSPRDLTATEVQSETALLTWRPPRASVTGYLLVYESVDGTVKEVIVGPDTTSYSLADLSPSTHYTAKIQALNGPLRSNMIQTIFTTIGLLYPFPKDCSQAMLNGDTTSGLYTIYLNGDKAEALEVFCDMTSDGGGWIVFLRRKNGRENFYQNWKAYAAGFGDRREEFWLGLDNLNKITAQGQYELRVDLRDHGETAFAVYDKFSVGDAKTRYKLKVEGYSGTAGDSMAYHNGRSFSTFDKDTDSAITNCALSYKGAFWYRNCHRVNLMGRYGDNNHSQGVNWFHWKGHEHSIQFAEMKLRPSNFRNLEGRRKRA

SEQ ID NO: 13561 - protein, 1564 aa, Homo Sapiens
MGAMTQLLAGVFLAFLALATEGGVLKKVIRHKRQSGVNATLPEENQPVVFNHVYNIKLPVGSQCSVDLESASGEKDLAPPSEPSESFQEHTVDGENQIVFTHRINIPRRACGCAAAPDVKELLSRLEELENLVSSLREQCTAGAGCCLQPATGRLDTRPFCSGRGNFSTEGCGCVCEPGWKGPNCSEPECPGNCHLRGRCIDGQCICDDGFTGEDCSQLACPSDCNDQGKCVNGVCICFEGYAGADCSREICPVPCSEEHGTCVDGLCVCHDGFAGDDCNKPLCLNNCYNRGRCVENECVCDEGFTGEDCSELICPNDCFDRGRCINGTCYCEEGFTGEDCGKPTCPHACHTQGRCEEGQCVCDEGFAGVDCSEKRCPADCHNRGRCVDGRCECDDGFTGADCGELKCPNGCSGHGRCVNGQCVCDEGYTGEDCSQLRCPNDCHSRGRCVEGKCVCEQGFKGYDCSDMSCPNDCHQHGRCVNGMCVCDDGYTGEDCRDRQCPRDCSNRGLCVDGQCVCEDGFTGPDCAELSCPNDCHGQGRCVNGQCVCHEGFMGKDCKEQRCPSDCHGQGRCVDGQCICHEGFTGLDCGQHSCPSDCNNLGQCVSGRCICNEGYSGEDCSEVSPPKDLVVTEVTEETVNLAWDNEMRVTEYLVVYTPTHEGGLEMQFRVPGDQTSTIIQELEPGVEYFIRVFAILENKKSIPVSARVATYLPAPEGLKFKSIKETSVEVEWDPLDIAFETWEIIFRNMNKEDEGEITKSLRRPETSYRQTGLAPGQEYEISLHIVKNNTRGPGLKRVTTTRLDAPSQIEVKDVTDTTALITWFKPLAEIDGIELTYGIKDVPGDRTTIDLTEDENQYSIGNLKPDTEYEVSLISRRGDMSSNPAKETFTTGLDAPRNLRRVSQTDNSITLEWRNGKAAIDSYRIKYAPISGGDHAEVDVPKSQQATTKTTLTGLRPGTEYGIGVSAVKEDKESNPATINAATELDTPKDLQVSETAETSLTLLWKTPLAKFDRYRLNYSLPTGQWVGVQLPRNTTSYVLRGLEPGQEYNVLLTAEKGRHKSKPARVKASTAMGSPKEVIFSDITENSATVSWRAPTAQVESFRITYVPITGGTPSMVTVDGTKTQTRLVKLIPGVEYLVSIIAMKGFEESEPVSGSFTTALDGPSGLVTANITDSEALARWQPAIATVDSYVISYTGEKVPEITRTVSGNTVEYALTDLEPATEYTLRIFAEKGPQKSSTITAKFTTDLDSPRDLTATEVQSETALLTWRPPRASVTGYLLVYESVDGTVKEVIVGPDTTSYSLADLSPSTHYTAKIQALNGPLRSNMIQTIFTTIGLLYPFPKDCSQAMLNGDTTSGLYTIYLNGDKAEALEVFCDMTSDGGGWIVFLRRKNGRENFYQNWKAYAAGFGDRREEFWLGLDNLNKITAQGQYELRVDLRDHGETAFAVYDKFSVGDAKTRYKLKVEGYSGTAGDSMAYHNGRSFSTFDKDTDSAITNCALSYKGAFWYRNCHRVNLMGRYGDNNHSQGVNWFHWKGHEHSIQFAEMKLRPSNFRNLEGRRKRA

SEQ ID NO: 13562 - protein, 1838 aa, Homo Sapiens
MGAMTQLLAGVFLAFLALATEGGVLKKVIRHKRQSGVNATLPEENQPVVFNHVYNIKLPVGSQCSVDLESASGEKDLAPPSEPSESFQEHTVDGENQIVFTHRINIPRRACGCAAAPDVKELLSRLEELENLVSSLREQCTAGAGCCLQPATGRLDTRPFCSGRGNFSTEGCGCVCEPGWKGPNCSEPECPGNCHLRGRCIDGQCICDDGFTGEDCSQLACPSDCNDQGKCVNGVCICFEGYAGADCSREICPVPCSEEHGTCVDGLCVCHDGFAGDDCNKPLCLNNCYNRGRCVENECVCDEGFTGEDCSELICPNDCFDRGRCINGTCYCEEGFTGEDCGKPTCPHACHTQGRCEEGQCVCDEGFAGVDCSEKRCPADCHNRGRCVDGRCECDDGFTGADCGELKCPNGCSGHGRCVNGQCVCDEGYTGEDCSQLRCPNDCHSRGRCVEGKCVCEQGFKGYDCSDMSCPNDCHQHGRCVNGMCVCDDGYTGEDCRDRQCPRDCSNRGLCVDGQCVCEDGFTGPDCAELSCPNDCHGQGRCVNGQCVCHEGFMGKDCKEQRCPSDCHGQGRCVDGQCICHEGFTGLDCGQHSCPSDCNNLGQCVSGRCICNEGYSGEDCSEVSPPKDLVVTEVTEETVNLAWDNEMRVTEYLVVYTPTHEGGLEMQFRVPGDQTSTIIQELEPGVEYFIRVFAILENKKSIPVSARVATYLPAPEGLKFKSIKETSVEVEWDPLDIAFETWEIIFRNMNKEDEGEITKSLRRPETSYRQTGLAPGQEYEISLHIVKNNTRGPGLKRVTTTRLDAPSQIEVKDVTDTTALITWFKPLAEIDGIELTYGIKDVPGDRTTIDLTEDENQYSIGNLKPDTEYEVSLISRRGDMSSNPAKETFTTGLDAPRNLRRVSQTDNSITLEWRNGKAAIDSYRIKYAPISGGDHAEVDVPKSQQATTKTTLTGLRPGTEYGIGVSAVKEDKESNPATINAATELDTPKDLQVSETAETSLTLLWKTPLAKFDRYRLNYSLPTGQWVGVQLPRNTTSYVLRGLEPGQEYNVLLTAEKGRHKSKPARVKASTAKEPEIGNLNVSDITPESFNLSWMATDGIFETFTIEIIDSNRLLETVEYNISGAERTAHISGLPPSTDFIVYLSGLAPSIRTKTISATATTEPKPQLGTLIFSNITPKSFNMSWTTQAGLFAKIVINVSDAHSLHESQQFTVSGDAKQAHITGLVENTGYDVSVAGTTLAGDPTRPLTAFVITEAEPEVDNLLVSDATPDGFRLSWTADEGVFDNFVLKIRDTKKQSEPLEITLLAPERTRDITGLREATEYEIELYGISKGRRSQTVSAIATTAMGSPKEVIFSDITENSATVSWRAPTAQVESFRITYVPITGGTPSMVTVDGTKTQTRLVKLIPGVEYLVSIIAMKGFEESEPVSGSFTTALDGPSGLVTANITDSEALARWQPAIATVDSYVISYTGEKVPEITRTVSGNTVEYALTDLEPATEYTLRIFAEKGPQKSSTITAKFTTDLDSPRDLTATEVQSETALLTWRPPRASVTGYLLVYESVDGTVKEVIVGPDTTSYSLADLSPSTHYTAKIQALNGPLRSNMIQTIFTTIGLLYPFPKDCSQAMLNGDTTSGLYTIYLNGDKAEALEVFCDMTSDGGGWIVFLRRKNGRENFYQNWKAYAAGFGDRREEFWLGLDNLNKITAQGQYELRVDLRDHGETAFAVYDKFSVGDAKTRYKLKVEGYSGTAGDSMAYHNGRSFSTFDKDTDSAITNCALSYKGAFWYRNCHRVNLMGRYGDNNHSQGVNWFHWKGHEHSIQFAEMKLRPSNFRNLEGRRKRA

SEQ ID NO: 13563 - protein, 1838 aa, Homo Sapiens; identical to SEQ ID NO: 13562

SEQ ID NO: 13564 - protein, 615 aa, Homo Sapiens
  misc_feature (1)..(1): Xaa can be any naturally occurring amino acid
XPELENLTVTEVGWDGLRLNWTAADQAYEHFIIQVQEANKVEAARNLTVPGSLRAVDIPGLKAATPYTVSIYGVIQGYRTPVLSAEASTAKEPEIGNLNVSDITPESFNLSWMATDGIFETFTIEIIDSNRLLETVEYNISGAERTAHISGLPPSTDFIVYLSGLAPSIRTKTISATATTEAEPEVDNLLVSDATPDGFRLSWTADEGVFDNFVLKIRDTKKQSEPLEITLLAPERTRDITGLREATEYEIELYGISKGRRSQTVSAIATTAMGSPKEVIFSDITENSATVSWRAPTAQVESFRITYVPITGGTPSMVTVDGTKTQTRLVKLIPGVEYLVSIIAMKGFEESEPVSGSFTTALDGPSGLVTANITDSEALARWQPAIATVDSYVISYTGEKVPEITRTVSGNTVEYALTDLEPATEYTLRIFAEKGPQKSSTITAKFTTDLDSPRDLTATEVQSETALLTWRPPRASVTGYLLVYESVDGTVKEVIVGPDTTSYSLADLSPSTHYTAKIQALNGPLRSNMIQTIFTTIGLLYPFPKDCSQAMLNGDTTSGLYTIYLNGDKAEALEVFCDMTSDGGGWIVFLRRKNGRENFYQNWKAYAAGFGDRRE

SEQ ID NO: 13565 - protein, 277 aa, Homo Sapiens
MIILIYLFLLLWEDTQGWGFKDGIFHNSIWLERAAGVYHREARSGKYKLTYAEAKAVCEFEGGHLATYKQLEAARKIGFHVCAAGWMAKGRVGYPIVKPGPNCGFGKTGIIDYGIRLNRSERWDAYCYNPHAKECGGVFTDPKQIFKSPGFPNEYEDNQICYWHIRLKYGQRIHLSFLDFDLEDDPGCLADYVEIYDSYDDVHGFVGRYCGDELPDDIISTGNVMTLKFLSDASVTAGGFQIKYVAMDPVSKSSQGKNTSTTSTGNKNFLAGRFSHL

SEQ ID NO: 13566 - protein, 616 aa, Homo Sapiens
MAPRARRRRPLFALLLLCALLARLQVALQIAPPCTSEKHYEHLGRCCNKCEPGKYMSSKCTTTSDSVCLPCGPDEYLDSWNEEDKCLLHKVCDTGKALVAVVAGNSTTPRRCACTAGYHWSQDCECCRRNTECAPGLGAQHPLQLNKDTVCKPCLAGYFSDAFSSTDKCRPWTNCTFLGKRVEHHGTEKSDAVCSSSLPARKPPNEPHVYLPGLIILLLFASVALVAAIIFGVCYRKKGKALTANLWHWINEACGRLSGDKESSGDSCVSTHTANFGQQGACEGVLLLTLEEKTFPEDMCYPDQGGVCQGTCVGGGPYAQGEDARMLSLVSKTEIEEDSFRQMPTEDEYMDRPSQPTDQLLFLTEPGSKSTPPFSEPLEVGENDSLSQCFTGTQSTVGSESCNCTEPLCRTDWTPMSSENYLQKEVDSGHCPHWAASPSPNWADVCTGCRNPPGEDCEPLVGSPKRGPLPQCAYGMGLPPEEEASRTEARDQPEDGADGRLPSSARAGAGSGSSPGGQSPASGNVTGNSNSTFISSGQVMNFKGDIIVVYVSQTSQEGAAAAAEPMGRPVQEETLARRDSFAGNGPRFPDPCGGPEGLREPEKASRPVQEQGGAKA

SEQ ID NO: 13567 - protein, 263 aa, Homo Sapiens
MAPRARRRRPLFALLLLCALLARLQVALQIAPPCTSEKHYEHLGRCCNKCEPGKYMSSKCTTTSDSVCLPCGPDEYLDSWNEEDKCLLHKVCDTGKALVAVVAGNSTTPRRCACTAGYHWSQDCECCRRNTECAPGLGAQHPLQLNKDTVCKPCLAGYFSDAFSSTDKCRPWTNCTFLGKRVEHHGTEKSDAVCSSSLPARKPPNEPHVYLPGLIILLLFASVALVAAIIFGVCYRKKGKALTANLWHWINEACGRLSGDKEM

SEQ ID NO: 13568 - protein, 263 aa, Homo Sapiens
MAPRARRRRPLFALLLLCALLARLQVALQIAPPCTSEKHYEHLGRCCNKCEPGKYMSSKCTTTSDSVCLPCGPDEYLDSWNEEDKCLLHKVCDTGKALVAVVAGNSTTPRRCACTAGYHWSQDCECCRRNTECAPGLGAQHPLQLNKDTVCKPCLAGYFSDAFSSTDKCRPWTNCTFLGKRVEHHGTEKSDAVCSSSLPARKPPNEPHVYLPGLIILLLFASVALVAAIIFGVCYRKKGKALTANLWHWINEACGRLSGDKES

SEQ ID NO: 13569 - protein, 337 aa, Homo Sapiens
MAPRARRRRPLFALLLLCALLARLQVALQIAPPCTSEKHYEHLGRCCNKCEPGKYMSSKCTTTSDSVCLPCGPDEYLDSWNEEDKCLLHKVCDTGKALVAVVAGNSTTPRRCACTAGYHWSQDCECCRRNTECAPGLGAQHPLQLNKDTVCKPCLAGYFSDAFSSTDKCRPWTNCTFLGKRVEHHGTEKSDAVCSSSLPARKPPNEPHVYLPGLIILLLFASVALVAAIIFGVCYRKKGKALTGNVTGNSNSTFISSGQVMNFKGDIIVVYVSQTSQEGAAAAAEPMGRPVQEETLARRDSFAGNGPRFPDPCGGPEGLREPEKASRPVQEQGGAKA

SEQ ID NO: 13570 - protein, 299 aa, Homo Sapiens
MAPRARRRRPLFALLLLCALLARLQVALQIAPPCTSEKHYEHLGRCCNKCEPGKYMSSKCTTTSDSVCLPCGPDEYLDSWNEEDKCLLHKVCDTGKALVAVVAGNSTTPRRCACTAGYHWSQDCECCRRNTECAPGLGAQHPLQLNKDTVCKPCLAGYFSDAFSSTDKCRPWTNCTFLGKRVEHHGTEKSDAVCSSSLPARKPPNGNVTGNSNSTFISSGQVMNFKGDIIVVYVSQTSQEGAAAAAEPMGRPVQEETLARRDSFAGNGPRFPDPCGGPEGLREPEKASRPVQEQGGAKA

SEQ ID NO: 13571 - protein, 145 aa, Homo Sapiens
MNNLLCCALVFLDISIKWTTQETFPPKYLHYDEETSHQLLCDKCPPGTYLKQHCTAKWKTVCAPCPDHYYTDSWHTSDECLYCSPVCKELQYVKQECNRTHNRVCECKEGRYLEIEFCLKHRSCPPGFGVVQAGCRRRPKPQICI

SEQ ID NO: 13572 - protein, 401 aa, Homo Sapiens
MNNLLCCALVFLDISIKWTTQETFPPKYLHYDEETSHQLLCDKCPPGTYLKQHCTAKWKTVCAPCPDHYYTDSWHTSDECLYCSPVCKELQYVKQECNRTHNRVCECKEGRYLEIEFCLKHRSCPPGFGVVQAGTPERNTVCKRCPDGFFSNETSSKAPCRKHTNCSVFGLLLTQKGNATHDNICSGNSESTQKCGIDVTLCEEAFFRFAVPTKFTPNWLSVLVDNLPGTKVNAESVERIKRQHSSQEQTFQLLKLWKHQNKDQDIVKKIIQDIDLCENSVQRHIGHANLTFEQLRSLMESLPGKKVGAEDIEKTIKACKPSDQILKLLSLWRIKNGDQDTLKGLMHALKHSKTYHFPKTVTQSLKKTIRFLHSFTMYKLYQKLFLEMIGNQVQSVKISCL

SEQ ID NO: 13573 - protein, 94 aa, Homo Sapiens
MARGSLRRLLRLLVLGLWLALLRSVAGEQAPASDPRPPPQAPPPAPAAAPGARTWTSAWTARLAGRDRTATSAWAALQHLLPPSGCFGPSLGAL

SEQ ID NO: 13574 - protein, 47 aa, Homo Sapiens
MARGSLRRLLRLLVLGLWLALLRSVAGEQAPDPRIAESRPQPLTRGP

SEQ ID NO: 13575 - protein, 94 aa, Homo Sapiens
MARGSLRRLLRLLVLGLWLALLRSVAGEQAPGAAAPPAPFRLLWPILGGALSLTFVLGLLSGFLVWRRCRRREKFTTPIEETGGEGCPAVALIQ

SEQ ID NO: 13576 - protein, 129 aa, Homo Sapiens
MARGSLRRLLRLLVLGLWLALLRSVAGEQAPGTAPCSRGSSWSADLDKCMDCASCRARPHSDFCLGCAAAPPAPFRLLWPILGGALSLTFVLGLLSGFLVWRRCRRREKFTTPIEETGGEGCPAVALIQ

SEQ ID NO: 13577 - protein, 226 aa, Homo Sapiens
MARGSLRRLLRLLVLGLWLALLRSVAGEQAPGTRDSGVGEPRAGAREPDWVSGEQRRTGGTGGCGDLGSGGLQTARSRLWEVPSLSKLHSQSGPQFLPPSNWGWGGSSVPQVRSTSNGERKRCSTSCPLPAALAHPWGRSEPDLRAGAAFWLFGLETMPQEREVHHPHRGDRRRGLPSCGADPVTMCPLPAGARPLIIHSSILEPVSASQTRREPSSSNHKGGGGR

SEQ ID NO: 13578 - protein, 80 aa, Homo Sapiens
MDCASCRARPHSDFCLGCAAAPPAPFRLLWPILGGALSLTFVLGLLSGFLVWRRCRRREKFTTPIEETGGEGCPAVALIQ

SEQ ID NO: 13579 - protein, 183 aa, Homo Sapiens
MEPPGDWGPPPWRSTPKTDVLRLVLYLTFLGAPCYAPALPSCKEDEYPVGSECCPKCSPGYRVKEACGELTGTVCEPCPPGTYIAHLNGLSKCLQCQMCDPAMGLRASRNCSRTENAVCGCSPGHFCIVQDGDHCAACRAYATSSPGQRVQKGGTESQDTLCQNCPPGTFSPNGTLEECQHQT

SEQ ID NO: 13580 - protein, 231 aa, Homo Sapiens
MEPPGDWGPPPWRSTPKTDVLRLVLYLTFLGAPCYAPALPSCKEDEYPVGSECCPKCSPGYRVKEACGELTGTVCEPCPPGTYIAHLNGLSKCLQCQMCDPAMGLRASRNCSRTENAVCGCSPGHFCIVQDGDHCAACRAYATSSPGQRVQKGGTESQDTLCQNCPPGTFSPNGTLEECQHQTKCSWLVTKAGAGTSSSHWVWWFLSGSLVIVIVCSTVGLIICVKRRKPR

SEQ ID NO: 13581 - protein, 231 aa, Homo Sapiens; identical to SEQ ID NO: 13580

SEQ ID NO: 13582 - protein, 231 aa, Homo Sapiens; identical to SEQ ID NO: 13580

SEQ ID NO: 13583 - protein, 283 aa, Homo Sapiens
MEPPGDWGPPPWRSTPKTDVLRLVLYLTFLGAPCYAPALPSCKEDEYPVGSECCPKCSPGYRVKEACGELTGTVCEPCPPGTYIAHLNGLSKCLQCQMCDPAMGLRASRNCSRTENAVCGCSPGHFCIVQDGDHCAACRAYATSSPGQRVQKGGTESQDTLCQNCPPGTFSPNGTLEECQHQTKCSWLVTKAGAGTSSSHWVWWFLSGSLVIVIVCSTVGLIICVKRRKPRGDVVKVIVSVQRKRQEAEGEATVIEALQAPPDVTTVAVEETIPSFTGRSPNH

SEQ ID NO: 13584 - protein, 193 aa, Homo Sapiens
MEPPGDWGPPPWRSTPKTDVLRLVLYLTFLGAPCYAPALPSCKEDEYPVGSECCPKCSPGYRVKEACGELTGTVCEPCPPGTYIAHLNGLSKCLQCQMCDPAMGLRASRNCSRTENAVCGCSPGHFCIVQDGDHCAACRAYATSSPGQRVQKGGTESQDTLCQNCPPGTFSPNGTLEECQHQTNRAWKSQTDL

SEQ ID NO: 13585 - protein, 25 aa, Homo Sapiens
  misc_feature (1)..(1): Xaa can be any naturally occurring amino acid
XGTLEECQHQTNWPNHMCEKKKAKG

SEQ ID NO: 13586 - protein, 255 aa, Homo Sapiens
MAQHGAMGAFRALCGLALLCALSLGQRPTGGPGCGPGRLLLGTGTDARCCRVHTTRCCRDYPGEECCSEWDCMCVQPEFHCGDPCCTTCRHHPCPPGQGVQSQGKFSFGFQCIDCASGTFSGGHEGHCKPWTDCCWRCRRRPKTPEAASSPRKSGASDRQRRRGGWETCGCEPGRPPGPPTAASPSPGAPQAAGALRSALGRALLPWQQKWVQEGGSDQRPGPCSSAAAAGPCRRERETQSWPPSSLAGPDGVGS

SEQ ID NO: 13587 - protein, 234 aa, Homo Sapiens
MAQHGAMGAFRALCGLALLCALSLGQRPTGGPGCGPGRLLLGTGTDARCCRVHTTRCCRDYPGEECCSEWDCMCVQPEFHCGDPCCTTCRHHPCPPGQGVQSQGKFSFGFQCIDCASGTFSGGHEGHCKPWTDCTQFGFLTVFPGNKTHNAVCVPGSPPAEPLGWLTVVLLAVAACVLLLTSAQLGLHIWQLRKTQLLLEVPPSTEDARSCQFPEEERGERSAEEKGRLGDLWV

SEQ ID NO: 13588 - protein, 241 aa, Homo Sapiens
MAQHGAMGAFRALCGLALLCALSLGQRPTGGPGCGPGRLLLGTGTDARCCRVHTTRCCRDYPGEECCSEWDCMCVQPEFHCGDPCCTTCRHHPCPPGQGVQSQGKFSFGFQCIDCASGTFSGGHEGHCKPWTDCTQFGFLTVFPGNKTHNAVCVPGSPPAEPLGWLTVVLLAVAACVLLLTSAQLGLHIWQLRSQCMWPRETQLLLEVPPSTEDARSCQFPEEERGERSAEEKGRLGDLWV

SEQ ID NO: 13589 - protein, 169 aa, Homo Sapiens
MCVQPEFHCGDPCCTTCRHHPCPPGQGVQSQGKFSFGFQCIDCASGTFSGGHEGHCKPWTDCTQFGFLTVFPGNKTHNAVCVPGSPPAEPLGWLTVVLLAVAACVLLLTSAQLGLHIWQLRSQCMWPRETQLLLEVPPSTEDARSCQFPEEERGERSAEEKGRLGDLWV

SEQ ID NO: 13590 - protein, 122 aa, Homo Sapiens
MGLSTVPDLLLPLEPTCTMTVQARGRIRTAGSVRAAPSPLQKTTSDTASAAPNAERKWVRWRSLLAQWTGTPCVAAGRTSTGIIGVKTFSSASIAASASMGPCTSPARRNRTPCAPAMQVSF

SEQ ID NO: 13591 - protein, 412 aa, Homo Sapiens
MGLSTVPDLLLPLVLLELLVGIYPSGVIGLVPHLGDREKRDSVCPQGKYIHPQNNSICCTKCHKEMGQVEISSCTVDRDTVCGCRKNQYRHYWSENLFQCFNCSLCLNGTVHLSCQEKQNTVCTCHAGFFLRENECVSCSNCKKSLECTKLCLPQIENVKGTEDSGTTVLLPLVIFFGLCLLSLLFIGLMYRYQRWKSKLYSIVCGKSTPEKEGELEGTTTKPLAPNPSFSPTPGFTPTLGFSPVPSSTFTSSSTYTPGDCPNFAAPRREVAPPYQGADPILATALASDPIPNPLQKWEDSAHKPQSLDTDDPATLYAVVENVPPLRWKEFVRRLGLSDHEIDRLELQNGRCLREAQYSMLATWRRRTPRREATLELLGRVLRDMDLLGCLEDIEEALCGPAALPPAPSLLR

SEQ ID NO: 13592 - protein, 72 aa, Homo Sapiens
MGLSTVPDLLLPLVLLELLVGIYPSGVIGLVPHLGDREKRDSVCPQGKYIHPQNNSICCTKCHKEPVPALLE

SEQ ID NO: 13593 - protein, 118 aa, Homo Sapiens
MGLSTVPDLLLPLVLLELLVGIYPSGVIGLVPHLGDREKRDSVCPQGKYIHPQNNSICCTKCHKGPGQDTDCRECESGSFTASENHLRHCLSCSKCRKEMGQVEISSCTVDRDTVCGC

SEQ ID NO: 13594 - protein, 71 aa, Homo Sapiens
MGLSTVPDLLLPLVLLELLVGIYPSGVIGLVPHLGDREKRDSVCPQGKYIHPQNNSICCTKCHKGTYLYND

SEQ ID NO: 13595 - protein, 254 aa, Homo Sapiens
MGLSTVPDLLLPLVLLELLVGIYPSGVIGLVPHLGDREKRDSVCPQGKYIHPQNNSICCTKCHKGTYLYNDCPGPGQDTDCRECESGSFTASENHLRHCLSCSKCRKEMGQVEISSCTVDRDTVCGCRKNQYRHYWSENLFQCFNCSLCLNGTVHLSCERSSPEAKPSPHPRGWPLPHAVALPFLPPPVFCGSDNQLLSGRPHPVPRHFLCPVGWGCRRFSFSCAALLPTGQEKQNTVCTCHAGFFLRENECVS

SEQ ID NO: 13596 - protein, 218 aa, Homo Sapiens
MGLSTVPDLLLPLVLLELLVGIYPSGVIGLVPHLGDREKRDSVCPQGKYIHPQNNSICCTKCHKGTYLYNDCPGPGQDTDCRECESGSFTASENHLRHCLSCSKCRKEMGQVEISSCTVDRDTVCGCRKNQYRHYWSENLFQCFNCSLCLNGTVHLSCQEKQNTVCTCHAGFFLRENECVSCSKVLLCRPGWNAVARSRLTATSASQIQAILLLQPPK

SEQ ID NO: 13597 - protein, 298 aa, Homo Sapiens
MGLSTVPDLLLPLVLLELLVGIYPSGVIGLVPHLGDREKRDSVCPQGKYIHPQNNSICCTKCHKGTYLYNDCPGPGQDTDCRECESGSFTASENHLRHCLSCSKCRKEMGQVEISSCTVDRDTVCGCRKNQYRHYWSENLFQCFNCSLCLNGTVHLSCQEKQNTVCTCHAGFFLRENECVSCSNCKKSLECTKLCLPQIENVKGTEDSGTTVLLPLVIFFGLCLLSLLFIGLMYRYQRWKSKLYSIGEWGLWEGEGAGGGEGGHGWVRWTCVEGGEECPLSSYRWGLWAEGGPGWLGR

SEQ ID NO: 13598 - protein, 455 aa, Homo Sapiens
MGLSTVPDLLLPLVLLELLVGIYPSGVIGLVPHLGDREKRDSVCPQGKYIHPQNNSICCTKCHKGTYLYNDCPGPGQDTDCRECESGSFTASENHLRHCLSCSKCRKEMGQVEISSCTVDRDTVCGCRKNQYRHYWSENLFQCFNCSLCLNGTVHLSCQEKQNTVCTCHAGFFLRENECVSCSNCKKSLECTKLCLPQIENVKGTEDSGTTVLLPLVIFFGLCLLSLLFIGLMYRYQRWKSKLYSIVCGKSTPEKEGELEGTTTKPLAPNPSFSPTPGFTPTLGFSPVPSSTFTSSSTYTPGDCPNFAAPRREVAPPYQGADPILATALASDPIPNPLQKWEDSAHKPQSLDTDDPATLYAVVENVPPLRWKEFVRRLGLSDHEIDRLELQNGRCLREAQYSMLATWRRRTPRREATLELLGRVLRDMDLLGCLEDIEEALCGPAALPPAPSLLR

SEQ ID NO: 13599 - protein, 155 aa, Homo Sapiens
MAPVAVWAALAVGLELWAAAHALPAQVAFTPYAPEPGSTCRLREYYDQTAQMCCSKCSPGQHAKVFCTKTSDTVCDSCEDSTYTQLWNWVPECLSCGSRCSSDQVETQACTREQNRICTCRPGWYCALSKQEGCRLCAPLRKCRPGFGVARPDLS

SEQ ID NO: 13600 - protein, 461 aa, Homo Sapiens
MAPVAVWAALAVGLELWAAAHALPAQVAFTPYAPEPGSTCRLREYYDQTAQMCCSKCSPGQHAKVFCTKTSDTVCDSCEDSTYTQLWNWVPECLSCGSRCSSDQVETQACTREQNRICTCRPGWYCALSKQEGCRLCAPLRKCRPGFGVARPGTETSDVVCKPCAPGTFSNTTSSTDICRPHQICNVVAIPGNASMDAVCTSTSPTRSMAPGAVHLPQPVSTRSQHTQPTPEPSTAPSTSFLLPMGPSPPAEGSTGDFALPVGLIVGVTALGLLIIGVVNCVIMTQVKKKPLCLQREAKVPHLPADKARGTQGPEQQHLLITAPSSSSSSLESSASALDRRAPTRNQPQAPGVEASGAGEARASTGSSDSSPGGHGTQVNVTCIVNVCSSSDHSSQCSSQASSTMGDTDSSPSESPKDEQVPFSKEECAFRSQLETPETLLGSTEEKPLPLGVPDAGMKPS

SEQ ID NO: 13601 - protein, 126 aa, Homo Sapiens
MEQRPRGCAAVAAALLLVLLGARAQGGTRSPRCDCAGDFHKKIGLFCCRGCPAASQVALENCSAVADTRCGCKPGWFVECQVSQCVSSSPFYCQPCLDCGALHRHTRLLCHPSVTLGQRPHPSSTS

SEQ ID NO: 13602 - protein, 136 aa, Homo Sapiens
MEQRPRGCAAVAAALLLVLLGARAQGGTRSPRCDCAGDFHKKIGLFCCRGCPAASQVALENCSAVADTRCGCKPGWFVECQVSQCVSSSPFYCQPCLDCGALHRHTRLLCSRRDTDCGTCLPGFYEHGDGCVSCPT

SEQ ID NO: 13603 - protein, 372 aa, Homo Sapiens
MEQRPRGCAAVAAALLLVLLGARAQGGTRSPRCDCAGDFHKKIGLFCCRGCPAASQVALENCSAVADTRCGCKPGWFVECQVSQCVSSSPFYCQPCLDCGALHRHTRLLCSRRDTDCGTCLPGFYEHGDGCVSCPTSTLGSCPERCAAVCGWRQMFWVQVLLAGLVVPLLLGATLTYTYRHCWPHKPLVTADEAGMEALTPPPATHLSPLDSAHTLLAPPDSSEKICTVQLVGNSWTPGYPETQEALCPQVTWSWDQLPSRALGPAAAPTLSPESPAGSPAMMLQPGPQLYDVMDAVPARRWKEFVRTLGLREAEIEAVEVEIGRFRDQQYEMLKRWRQQQPAGLGAVYAALERMGLDGCVEDLRSRLQRGP

SEQ ID NO: 13604 - protein, 234 aa, Homo Sapiens
MEQRPRGCAAVAAALLLVLLGARAQGGTRSPRCDCAGDFHKKIGLFCCRGCPADEAGMEALTPPPATHLSPLDSAHTLLAPPDSSEKICTVQLVGNSWTPGYPETQEALCPQVTWSWDQLPSRALGPAAAPTLSPESPAGSPAMMLQPGPQLYDVMDAVPARRWKEFVRTLGLREAEIEAVEVEIGRFRDQQYEMLKRWRQQQPAGLGAVYAALERMGLDGCVEDLRSRLQRGP

SEQ ID NO: 13605 - protein, 181 aa, Homo Sapiens
MEQRPRGCAAVAAALLLVLLGARAQGGTRSPRCDCAGDFHKKIGLFCCRGCPAGHYLKAPCTEPCGNSTCLVCPQDTFLAWENHHNSECARCQACDEQASQVALENCSAVADTRCGCKPGWFVECQVSQCVSSSPFYCQPCLDCGALHRHTRLLCSRRDTDCGTCLPGFYEHGDGCVSCPT

SEQ ID NO: 13606 - protein, 277 aa, Homo Sapiens
MEQRPRGCAAVAAALLLVLLGARAQGGTRSPRCDCAGDFHKKIGLFCCRGCPAGHYLKAPCTEPCGNSTCLVCPQDTFLAWENHHNSECARCQACDEQASQVALENCSAVADTRCGCKPGWFVECQVSQCVSSSPFYCQPCLDCGALHRHTRLLCSRRDTDCGTCLPGFYEHGDGCVSCPTPPPSLAGAPWGAVQSAVPLSVAGGRVGGVLGMRVGELGWTEGRRVRRGATTQHPPAAFSVLGPGAPGWPCGPPPAWGHPDLHIPPLLASQAPGYCR

SEQ ID NO: 13607 - protein, 426 aa, Homo Sapiens
MEQRPRGCAAVAAALLLVLLGARAQGGTRSPRCDCAGDFHKKIGLFCCRGCPAGHYLKAPCTEPCGNSTCLVCPQDTFLAWENHHNSECARCQACDEQASQVALENCSAVADTRCGCKPGWFVECQVSQCVSSSPFYCQPCLDCGALHRHTRLLCSRRDTDCGTCLPGFYEHGDGCVSCPTPPPSLAGAPWGAVQSAVPLSVAGGRVGVFWVQVLLAGLVVPLLLGATLTYTYRHCWPHKPLVTADEAGMEALTPPPATHLSPLDSAHTLLAPPDSSEKICTVQLVGNSWTPGYPETQEALCPQVTWSWDQLPSRALGPAAAPTLSPESPAGSPAMMLQPGPQLYDVMDAVPARRWKEFVRTLGLREAEIEAVEVEIGRFRDQQYEMLKRWRQQQPAGLGAVYAALERMGLDGCVEDLRSRLQRGP

SEQ ID NO: 13608 - protein, 417 aa, Homo Sapiens
MEQRPRGCAAVAAALLLVLLGARAQGGTRSPRCDCAGDFHKKIGLFCCRGCPAGHYLKAPCTEPCGNSTCLVCPQDTFLAWENHHNSECARCQACDEQASQVALENCSAVADTRCGCKPGWFVECQVSQCVSSSPFYCQPCLDCGALHRHTRLLCSRRDTDCGTCLPGFYEHGDGCVSCPTSTLGSCPERCAAVCGWRQMFWVQVLLAGLVVPLLLGATLTYTYRHCWPHKPLVTADEAGMEALTPPPATHLSPLDSAHTLLAPPDSSEKICTVQLVGNSWTPGYPETQEALCPQVTWSWDQLPSRALGPAAAPTLSPESPAGSPAMMLQPGPQLYDVMDAVPARRWKEFVRTLGLREAEIEAVEVEIGRFRDQQYEMLKRWRQQQPAGLGAVYAALERMGLDGCVEDLRSRLQRGP

SEQ ID NO: 13609 - protein, 380 aa, Homo Sapiens
MEQRPRGCAAVAAALLLVLLGARAQGGTRSPRCDCAGDFHKKIGLFCCRGCPAGHYLKAPCTEPCGNSTCLVCPQDTFLAWENHHNSECARCQACDEQASQVALENCSAVADTRCGCKPGWFVECQVSQCVSSSPFYCQPCLDCGALHRHTRLLCSRRDTDCGTCLPGFYEHGDGCVSCPTSTLGSCPERCAAVCGWRQNEAGMEALTPPPATHLSPLDSAHTLLAPPDSSEKICTVQLVGNSWTPGYPETQEALCPQVTWSWDQLPSRALGPAAAPTLSPESPAGSPAMMLQPGPQLYDVMDAVPARRWKEFVRTLGLREAEIEAVEVEIGRFRDQQYEMLKRWRQQQPAGLGAVYAALERMGLDGCVEDLRSRLQRGP

SEQ ID NO: 13610 - protein, 253 aa, Homo Sapiens
MEQRPRGCAAVAAALLLVLLGARAQGGTRSPRCDCAGDFHKKIGLFCCRGCPAGHYLKAPCTEPCGNSTCLVCPQDTFLAWENHHNSECARCQACDEQASQVALENCSAVADTRCGCKPGWFVECQVSQCVSSSPFYCQPCLDCGALHRHTRLLCSRRDTDCGTCLPGFYEHGDGCVSCPTSTLGSCPERCAAVCGWRQSRWCAGNASGRTGMDRGEAGEEGGNHPTPTSCFQCSGSRCSWLALWSPSCLGPP

SEQ ID NO: 13611 - protein, 218 aa, Homo Sapiens
MEQRPRGCAAVAAALLLVLLGARAQGGTRSPRCDCAGDFHKKIGLFCCRGCPAGHYLKAPCTEPCGNSTCLVCPQDTFLAWENHHNSECARCQACDEQASQVALENCSAVADTRCGCKPGWFVECQVSQCVSSSPFYCQPCLDCGALHRHTRLLCSRRDTDCGTCLPGFYEHGDGCVSCPTVLGPGAPGWPCGPPPAWGHPDLHIPPLLASQAPGYCR

SEQ ID NO: 13612 - protein, 45 aa, Homo Sapiens
MFWVQVLLAGLVVPLLLGATLTYTYRHCWPHKPLVTDEAGMEALT

SEQ ID NO: 13613 - protein, 300 aa, Homo Sapiens
MRALEGPGLSLLCLVLALPALLPVPAVRGVAETPTYPWRDAETGERLVCAQCPPGTFVQRPCRRDSPTTCGPCPPRHYTQFWNYLERCRYCNVLCGEREEEARACHATHNRACRCRTGFFAHAGFCLEHASCPPGAGVIAPGTPSQNTQCQPCPPGTFSASSSSSEQCQPHRNCTALGLALNVPGSSSHDTLCTSCTGFPLSTRVPGAEECERAVIDFVAFQDISIKRLQRLLQALEAPEGWGPTPRAGRAALQLKLRRRLTELLGAQDGALLVRLLQALRVARMPGLERSVRERFLPVH

SEQ ID NO: 13614 - protein, 244 aa, Homo Sapiens
MDPNRISEDGTHCIYRILRLHENADFQDTTLESQDTKLIPDSCRRIKQAFQGAVQKELQHIVGSQHIRAEKAMVDGSWLDLAKRSKLEAQPFAHLTINATDIPSGSHKVSLSSWYHDRGWAKISNMTFSNGKLIVNQDGFYYLYANICFRHHETSGDLATEYLQLMVYVTKTSIKIPSSHTLMKGGSTKYWSGNSEFHFYSINVGGFFKLRSGEEISIEVSNPSLLDPDQDATYFGAFKVRDID

SEQ ID NO: 13615 - protein, 244 aa, Homo Sapiens; identical to SEQ ID NO: 13614

SEQ ID NO: 13616 - protein, 244 aa, Homo Sapiens; identical to SEQ ID NO: 13614

SEQ ID NO: 13617 - protein, 270 aa, Homo Sapiens
MFVALLGLGLGQVVCSVALFFYFRAQMDPNRISEDGTHCIYRILRLHENADFQDTTLESQDTKLIPDSCRRIKQAFQGAVQKELQHIVGSQHIRAEKAMVDGSWLDLAKRSKLEAQPFAHLTINATDIPSGSHKVSLSSWYHDRGWAKISNMTFSNGKLIVNQDGFYYLYANICFRHHETSGDLATEYLQLMVYVTKTSIKIPSSHTLMKGGSTKYWSGNSEFHFYSINVGGFFKLRSGEEISIEVSNPSLLDPDQDATYFGAFKVRDID

SEQ ID NO: 13618 - protein, 317 aa, Homo Sapiens
MRRASRDYTKYLRGSEEMGGGPGAPHEGPLHAPPPPAPHQPPAASRSMFVALLGLGLGQVVCSVALFFYFRAQMDPNRISEDGTHCIYRILRLHENADFQDTTLESQDTKLIPDSCRRIKQAFQGAVQKELQHIVGSQHIRAEKAMVDGSWLDLAKRSKLEAQPFAHLTINATDIPSGSHKVSLSSWYHDRGWAKISNMTFSNGKLIVNQDGFYYLYANICFRHHETSGDLATEYLQLMVYVTKTSIKIPSSHTLMKGGSTKYWSGNSEFHFYSINVGGFFKLRSGEEISIEVSNPSLLDPDQDATYFGAFKVRDID

SEQ ID NO: 13619 - protein, 134 aa, Homo Sapiens
MAARRSQRRRGRRGEPGTALLVPLALGLGLALACLGLLLAVVSLGSRASLSAQEPAQEELVAEEDQDPSELNPQTEESQDPAPFLNRLVRPRRSAPKGRKTRARRAIAAHYEVHPRPGQDGAQADGGYTTCLRP

SEQ ID NO: 13620 - protein, 249 aa, Homo Sapiens
MAARRSQRRRGRRGEPGTALLVPLALGLGLALACLGLLLAVVSLGSRASLSAQEPAQEELVAEEDQDPSELNPQTEESQDPAPFLNRLVRPRRSAPKGRKTRARRAIAAHYEVHPRPGQDGAQAGVDGTVSGWEEARINSSSPLRYNRQIGEFIVTRAGLYYLYCQVHFDEGKAVYLKLDLLVDGVLALRCLEEFSATAASSLGPQLRLCQVSGLLALRPGSSLRIRTLPWAHLKAAPFLTYFGLFQVH

SEQ ID NO: 13621 - protein, 330 aa, Homo Sapiens
MAARRSQRRRGRRGEPGTALLVPLALGLGLALACLGLLLAVVSLGSRASLSAQEPAQEELVAEEDQDPSELNPQTEESQDPAPFLNRLVRPRRSAPKGRKTRARRAIAAHYEVHPRPGQDGAQAGVDGTVSGWEEARINSSSPLRYNRQIGEFIVTRAGLYYLYCQSSDALEAWENGERSRKRRAVLTQKQKKQHSVLHLVPINATSKDDSDVTEVMWQPALRRGRGLQAQGYGVRIQDAGVYLLYSQVLFQDVTFTMGQVVSREGQGRQETLFRCIRSMPSHPDRAYNSCYSAGVFHLHQGDILSVIIPRARAKLNLSPHGTFLGFVKL

SEQ ID NO: 13622 - protein, 251 aa, Homo Sapiens
MAEDLGLSFGETASVEMLPEHGSCRPKARSSSARWALTCCLVLLPFLAGLTTYLLVSQLRAQGEACVQFQALKGQEFAPSHQQVYAPLRADGDKPRAHLTVVRQTPTQHFKNQFPALHWEHELGLAFTKNRMNYTNKFLLIPESGDYFIYSQVTFRGMTSECSEIRQAGRPNKPDSITVVITKVTDSYPEPTQLLMGTKSVCEVGSNWFQPIYLGAMFSLQEGDKLMVNVSDISLVDYTKEDKTFFGAFLL

SEQ ID NO: 13623 - protein, 174 aa, Homo Sapiens
MRHFLSKVYSFPMRKLILFLVFPVVRQTPTQHFKNQFPALHWEHELGLAFTKNRMNYTNKFLLIPESGDYFIYSQVTFRGMTSECSEIRQAGRPNKPDSITVVITKVTDSYPEPTQLLMGTKSVCEVGSNWFQPIYLGAMFSLQEGDKLMVNVSDISLVDYTKEDKTFFGAFLL

SEQ ID NO: 13624 - protein, 1299 aa, Homo Sapiens
MSLQEMFRFPMGLLLGSVLLVASAPATLEPPGCSNKEQQVTVSHTYKIDVPKSALVQVDADPQPLSDDGASLLALGEAREEQNIIFRHNIRLQTPQKDCELAGSVQDLLARVKKLEEEMVEMKEQCSAQRCCQGVTDLSRHCSGHGTFSLETCSCHCEEGREGPACERLACPGACSGHGRCVDGRCLCHEPYVGADCGYPACPENCSGHGECVRGVCQCHEDFMSEDCSEKRCPGDCSGHGFCDTGECYCEEGFTGLDCAQVVTPQGLQLLKNTEDSLLVSWEPSSQVDHYLLSYYPLGKELSGKQIQVPKEQHSYEILGLLPGTKYIVTLRNVKNEVSSSPQHLLATTDLAVLGTAWVTDETENSLDVEWENPSTEVDYYKLRYGPMTGQEVAEVTVPKSSDPKSRYDITGLHPGTEYKITVVPMRGELEGKPILLNGRTEIDSPTNVVTDRVTEDTATVSWDPVQAVIDKYVVRYTSADGDTKEMAVHKDESSTVLTGLKPGEAYKVYVWAERGNQGSKKADTNALTEIDSPANLVTDRVTENTATISWDPVQATIDKYVVRYTSADDQETREVLVGKEQSSTVLTGLRPGVEYTVHVWAQKGDRESKKADTNAPTDIDSPKNLVTDRVTENMATVSWDPVQAAIDKYVVRYTSAGGETREVPVGKEQSSTVLTGLRPGMEYMVHVWAQKGDQESKKADTKAQTDIDSPQNLVTDRVTENMATVSWDPVRATIDRYVVRYTSAKDGETREVPVGKEQSSTVLTGLRPGVEYTVHVWAQKGAQESKKADTKAQTDIDSPQNLVTDWVTENTATVSWDPVQATIDRYVVHYTSANGETREVPVGKEQSSTVLTGLRPGMEYTVHVWAQKGNQESKKADTKAQTEIDGPKNLVTDWVTENMATVSWDPVQATIDKYMVRYTSADGETREVPVGKEHSSTVLTGLRPGMEYMVHVWAQKGAQESKKADTKAQTELDPPRNLRPSAVTQSGGILTWTPPSAQIHGYILTYQFPDGTVKEMQLGREDQRFALQGLEQGATYPVSLVAFKGGRRSRNVSTTLSTVGARFPHPSDCSQVQQNSNAASGLYTIYLHGDASRPLQVYCDMETDGGGWIVFQRRNTGQLDFFKRWRSYVEGFGDPMKEFWLGLDKLHNLTTGTPARYEVRVDLQTANESAYAIYDFFQVASSKERYKLTVGKYRGTAGDALTYHNGWKFTTFDRDNDIALSNCALTHHGGWWYKNCHLANPNGRYGETKHSEGVNWEPWKGHEFSIPYVELKIRPHGYSREPVLGRKKRTLRGRLRTF

SEQ ID NO: 13625 - protein, 1122 aa, Homo Sapiens
MSLQEMFRFPMGLLLGSVLLVASAPATLEPPGCSNKEQQVTVSHTYKIDVPKSALVQVDADPQPLSDDGASLLALGEAREEQNIIFRHNIRLQTPQKDCELAGSVQDLLARVKKLEEEMVEMKEQCSAQRCCQGVTDLSRHCSGHGTFSLETCSCHCEEGREGPACERLACPGACSGHGRCVDGRCLCHEPYVGADCGYPACPENCSGHGECVRGVCQCHEDFMSEDCSEKRCPGDCSGHGFCDTGECYCEEGFTGLDCAQVVTPQGLQLLKNTEDSLLVSWEPSSQVDHYLLSYYPLGKELSGKQIQVPKEQHSYEILGLLPGTKYIVTLRNVKNEVSSSPQHLLATTDLAVLGTAWVTDETENSLDVEWENPSTEVDYYKLRYGPMTGQEVAEVTVPKSSDPKSRYDITGLHPGTEYKITVVPMRGELEGKPILLNGRTEIDSPTNVVTDRVTEDTATVSWDPVQAVIDKYVVRYTSADGDTKEMAVHKDESSTVLTGLKPGEAYKVYVWAERGNQGSKKADTNALTDIDSPQNLVTDRVTENMATVSWDPVRATIDRYVVRYTSAKDGETREVPVGKEQSSTVLTGLRPGVEYTVHVWAQKGAQESKKADTKAQTDIDSPQNLVTDWVTENTATVSWDPVQATIDRYVVHYTSANGETREVPVGKEQSSTVLTGLRPGMEYTVHVWAQKGNQESKKADTKAQTEIDGPKNLVTDWVTENMATVSWDPVQATIDKYMVRYTSADGETREVPVGKEHSSTVLTGLRPGMEYMVHVWAQKGAQESKKADTKAQTELDPPRNLRPSAVTQSGGILTWTPPSAQIHGYILTYQFPDGTVKEMQLGREDQRFALQGLEQGATYPVSLVAFKGGRRSRNVSTTLSTVGARFPHPSDCSQVQQNSNAASGLYTIYLHGDASRPLQVYCDMETDGGGWIVFQRRNTGQLDFFKRWRSYVEGFGDPMKEFWLGLDKLHNLTTGTPARYEVRVDLQTANESAYAIYDFFQVASSKERYKLTVGKYRGTAGDALTYHNGWKFTTFDRDNDIALSNCALTHHGGWWYKNCHLANPNGRYGETKHSEGVNWEPWKGHEFSIPYVELKIRPHGYSREPVLGRKKRTLRGRLRTF

SEQ ID NO: 13626 - protein, 1122 aa, Homo Sapiens
MSLQEMFRFPMGLLLGSVLLVASAPATLEPPGCSNKEQQVTVSHTYKIDVPKSALVQVDADPQPLSDDGASLLALGEAREEQNIIFRHNIRLQTPQKDCELAGSVQDLLARVKKLEEEMVEMKEQCSAQRCCQGVTDLSRHCSGHGTFSLETCSCHCEEGREGPACERLACPGACSGHGRCVDGRCLCHEPYVGADCGYPACPENCSGHGECVRGVCQCHEDFMSEDCSEKRCPGDCSGHGFCDTGECYCEEGFTGLDCAQVVTPQGLQLLKNTEDSLLVSWEPSSQVDHYLLSYYPLGKELSGKQIQVPKEQHSYEILGLLPGTKYIVTLRNVKNEVSSSPQHLLATTDLAVLGTAWVTDETENSLDVEWENPSTEVDYYKLRYGPMTGQEVAEVTVPKSSDPKSRYDITGLHPGTEYKITVVPMRGELEGKPILLNGRTEIDSPTNVVTDRVTEDTATVSWDPVQAVIDKYVVRYTSADGDTKEMAVHKDESSTVLTGLKPGEAYKVYVWAERGNQGSKKADTNALTEIDSPANLVTDRVTENTATISWDPVQATIDRYVVRYTSAKDGETREVPVGKEQSSTVLTGLRPGVEYTVHVWAQKGAQESKKADTKAQTDIDSPQNLVTDWVTENTATVSWDPVQATIDRYVVHYTSANGETREVPVGKEQSSTVLTGLRPGMEYTVHVWAQKGNQESKKADTKAQTEIDGPKNLVTDWVTENMATVSWDPVQATIDKYMVRYTSADGETREVPVGKEHSSTVLTGLRPGMEYMVHVWAQKGAQESKKADTKAQTELDPPRNLRPSAVTQSGGILTWTPPSAQIHGYILTYQFPDGTVKEMQLGREDQRFALQGLEQGATYPVSLVAFKGGRRSRNVSTTLSTVGARFPHPSDCSQVQQNSNAASGLYTIYLHGDASRPLQVYCDMETDGGGWIVFQRRNTGQLDFFKRWRSYVEGFGDPMKEFWLGLDKLHNLTTGTPARYEVRVDLQTANESAYAIYDFFQVASSKERYKLTVGKYRGTAGDALTYHNGWKFTTFDRDNDIALSNCALTHHGGWWYKNCHLANPNGRYGETKHSEGVNWEPWKGHEFSIPYVELKIRPHGYSREPVLGRKKRTLRGRLRTF

SEQ ID NO: 13627 - protein, 1358 aa, Homo Sapiens
MGADGETVVLKNMLIGINLILLGSMIKPSECQLEVTTERVQRQSVEEEGGIANYNTSSKEQPVVFNHVYNINVPLDNLCSSGLEASAEQEVSAEDETLAEYMGQTSDHESQVTFTHRINFPKKACPCASSAQVLQELLSRIEMLEREVSVLRDQCNANCCQESAATGQLDYIPHCSGHGNFSFESCGCICNEGWFGKNCSEPYCPLGCSSRGVCVDGQCICDSEYSGDDCSELRCPTDCSSRGLCVDGECVCEEPYTGEDCRELRCPGDCSGKGRCANGTCLCEEGYVGEDCGQRQCLNACSGRGQCEEGLCVCEEGYQGPDCSAVAPPEDLRVAGISDRSIELEWDGPMAVTEYVISYQPTALGGLQLQQRVPGDWSGVTITELEPGLTYNISVYAVISNILSLPITAKVATHLSTPQGLQFKTITETTVEVQWEPFSFSFDGWEISFIPKNNEGGVIAQVPSDVTSFNQTGLKPGEEYIVNVVALKEQARSPPTSASVSTVIDGPTQILVRDVSDTVAFVEWIPPRAKVDFILLKYGLVGGEGGRTTFRLQPPLSQYSVQALRPGSRYEVSVSAVRGTNESDSATTQFTTEIDAPKNLRVGSRTATSLDLEWDNSEAEVQEYKVVYSTLAGEQYHEVLVPRGIGPTTRATLTDLVPGTEYGVGISAVMNSQQSVPATMNARTELDSPRDLMVTASSETSISLIWTKASGPIDHYRITFTPSSGIASEVTVPKDRTSYTLTDLEPGAEYIISVTAERGRQQSLESTVDAFTGFRPISHLHFSHVTSSSVNITWSDPSPPADRLILNYSPRDEEEEMMEVSLDATKRHAVLMGLQPATEYIVNLVAVHGTVTSEPIVGSITTGIDPPKDITISNVTKDSVMVSWSPPVASFDYYRVSYRPTQVGRLDSSVVPNTVTEFTITRLNPATEYEISLNSVRGREESERICTLVHTAMDNPVDLIATNITPTEALLQWKAPVGEVENYVIVLTHFAVAGETILVDGVSEEFRLVDLLPSTHYTATMYATNGPLTSGTISTNFSTLLDPPANLTASEVTRQSALISWQPPRAEIENYVLTYKSTDGSRKELIVDAEDTWIRLEGLLENTDYTVLLQAAQDTTWSSITSTAFTTGGRVFPHPQDCAQHLMNGDTLSGVYPIFLNGELSQKLQVYCDMTTDGGGWIVFQRRQNGQTDFFRKWADYRVGFGNVEDEFWLGLDNIHRITSQGRYELRVDMRDGQEAAFASYDRFSVEDSRNLYKLRIGSYNGTAGDSLSYHQGRPFSTEDRDNDVAVTNCAMSYKGAWWYKNCHRTNLNGKYGESRHSQGINWYHWKGHEFSIPFVEMKMRPYNHRLMAGRKRQSLQF

SEQ ID NO: 13628 - protein, 1358 aa, Homo Sapiens; identical to SEQ ID NO: 13627

SEQ ID NO: 13629 - protein, 181 aa, Homo Sapiens
  misc_feature (1)..(1): Xaa can be any naturally occurring amino acid
XINFPKKACPCASSAQVLQELLSRIEMLEREVSVLRDQCNANCCQESAATVAPPEDLRVAGISDRSIELEWDGPMAVTEYVISYQPTALGGLQLQQRVPGDWSGVTITELEPGLTYNISVYAVISNILSLPITAKVATHLSTPQGLQFKTITETTVEVQWEPFSFSFDGWEISFIPKNNEG

SEQ ID NO: 13630 - protein, 1962 aa, Homo Sapiens
APGKDEEMAPASTEPPTPEPPIKPRLEELTVTDATPDSLSLSWTVPEGQFDHFLVQYKNGDGQPKATRVPGHEDRVTISGLEPDNKYKMNLYGFHGGQRVGPVSAIGVTAAEEETPSPTEPSMEAPEPPEEPLLGELTVTGSSPDSLSLSWTVPQGRFDSFTVQYKDRDGRPQVVRVGGEESEVTVGGLEPGRKYKMHLYGLHEGRRVGPVSTVGVTAPQEDVDETPSPTEPGTEAPGPPEEPLLGELTVTGSSPDSLSLSWTVPQGRFDSFTVQYKDRDGRPQAVRVGGQESKVTVRGLEPGRKYKMHLYGLHEGRRLGPVSAVGVTEDEAETTQAVPTMTPEPPIKPRLGELTMTDATPDSLSLSWTVPEGQFDHFLVQYRNGDGQPKAVRVPGHEDGVTISGLEPDHKYKMNLYGFHGGQRVGPISVIGVTAAEEETPSPTELSTEAPEPPEEPLLGELTVTGSSPDSLSLSWTIPQGHFDSFTVQYKDRDGRPQVMRVRGEESEVTVGGLEPGRKYKMHLYGLHEGRRVGPVSTVGVTEDEAETTQAVPTTTPEPPNKPRLGELTVTDATPDSLSLSWMVPEGQFDHFLVQYRNGDGQPKVVRVPGHEDGVTISGLEPDHKYKMNLYGFHGGQRVGPISVIGVTAAEEETPAPTEPSTEAPEPPEEPLLGELTVTGSSPDSLSLSWTIPQGRFDSFTVQYKDRDGRPQVVRVRGEESEVTVGGLEPGCKYKMHLYGLHEGQRVGPVSAVGVTAPKDEAETTQAVPTMTPEPPIKPRLGELTVTDATPDSLSLSWMVPEGQFDHFLVQYRNGDGQPKAVRVPGHEDGVTISGLEPDHKYKMNLYGFHGGQRVGPVSAIGVTEEETPSPTEPSTEAPEAPEEPLLGELTVTGSSPDSLSLSWTVPQGRFDSFTVQYKDRDGQPQVVRVRGEESEVTVGGLEPGRKYKMHLYGLHEGQRVGPVSTVGITAPLPTPLPVEPRLGELAVAAVTSDSVGLSWTVAQGPFDSFLVQYRDAQGQPQAVPVSGDLRAVAVSGLDPARKYKFLLFGLQNGKRHGPVPVEARTAPDTKPSPRLGELTVTDATPDSVGLSWTVPEGEFDSFVVQYKDKDGRLQVVPVAANQREVTVQGLEPSRKYRFLLYGLSGRKRLGPISADSTTAPLEKELPPHLGELTVAEETSSSLRLSWTVAQGPFDSFVVQYRDTDGQPRAVPVAADQRTVTVEDLEPGKKYKFLLYGLLGGKRLGPVSALGMTAPEEDTPAPELAPEAPEPPEEPRLGVLTVTDTTPDSMRLSWSVAQGPFDSFVVQYEDTNGQPQALLVDGDQSKILISGLEPSTPYRFLLYGLHEGKRLGPLSAEGTTGLAPAGQTSEESRPRLSQLSVTDVTTSSLRLNWEAPPGAFDSFLLRFGVPSPSTLEPHPRPLLQRELMVPGTRHSAVLRDLRSGTLYSLTLYGLRGPHKADSIQGTARTLSPVLESPRDLQFSEIRETSAKVNWMPPPSRADSFKVSYQLADGGEPQSVQVDGQARTQKLQGLIPGARYEVTVVSVRGFEESEPLTGFLTTVPDGPTQLRALNLTEGFAVLHWKPPQNPVDTYDVQVTAPGAPPLQAETPGSAVDYPLHDLVLHTNYTATVRGLRGPNLTSPASITFTTGLEAPRDLEAKEVTPRTALLTWTEPPVRPAGYLLSFHTPGGQNQEILLPGGITSHQLLGLFPSTSYNARLQAMWGQSLLPPVSTSFTTGGLRIPFPRDCGEEMQNGAGASRTSTIFLNGNRERPLNVFCDMETDGGGWLVFQRRMDGQTDFWRDWEDYAHGFGNISGEFWLGNEALHSLTQAGDYSMRVDLRAGDEAVFAQYDSFHVDSAAEYYRLHLEGYHGTAGDSMSYHSGSVFSARDRDPNSLLISCAVSYRGAWWYRNCHYANLNGLYGSTVDHQGVSWYHWKGFEFSVPFTEMKLRPRNFRSPAGGG

SEQ ID NO: 13631 - protein, 8 aa, Homo Sapiens
MMPAQYAL

SEQ ID NO: 13632 - protein, 4244 aa, Homo Sapiens
MMPAQYALTSSLVLLVLLSTARAGPFSSRSNVTLPAPRPPPQPGGHTVGAGVGSPSSQLYEHTVEGGEKQVVFTHRINLPPSTGCGCPPGTEPPVLASEVQALRVRLEILEELVKGLKEQCTGGCCPASAQAGTGQTDVRTLCSLHGVFDLSRCTCSCEPGWGGPTCSDPTDAEIPPSSPPSASGSCPDDCNDQGRCVRGRCVCFPGYTGPSCGWPSCPGDCQGRGRCVQGVCVCRAGFSGPDCSQRSCPRGCSQRGRCEGGRCVCDPGYTGDDCGMRSCPRGCSQRGRCENGRCVCNPGYTGEDCGVRSCPRGCSQRGRCKDGRCVCDPGYTGEDCGTRSCPWDCGEGGRCVDGRCVCWPGYTGEDCSTRTCPRDCRGRGRCEDGECICDTGYSGDDCGVRSCPGDCNQRGRCEDGRCVCWPGYTGTDCGSRACPRDCRGRGRCENGVCVCNAGYSGEDCGVRSCPGDCRGRGRCESGRCMCWPGYTGRDCGTRACPGDCRGRGRCVDGRCVCNPGFTGEDCGSRRCPGDCRGHGLCEDGVCVCDAGYSGEDCSTRSCPGGCRGRGQCLDGRCVCEDGYSGEDCGVRQCPNDCSQHGVCQDGVCICWEGYVSEDCSIRTCPSNCHGRGRCEEGRCLCDPGYTGPTCATRMCPADCRGRGRCVQGVCLCHVGYGGEDCGQEEPPASACPGGCGPRELCRAGQCVCVEGFRGPDCAIQTCPGDCRGRGECHDGSCVCKDGYAGEDCGEEVPTIEGMRMHLLEETTVRTEWTPAPGPVDAYEIQFIPTTEGASPPFTARVPSSASAYDQRGLAPGQEYQVTVRALRGTSWGLPASKTITTMIDGPQDLRVVAVTPTTLELGWLRPQAEVDRFVVSYVSAGNQRVRLEVPPEADGTLLTDLMPGVEYVVTVTAERGRAVSYPASVRANTGSSPLGLLGTTDEPPPSGPSTTQGAQAPLLQQRPQELGELRVLGRDETGRLRVVWTAQPDTFAYFQLRMRVPEGPGAHEEVLPGDVRQALVPPPPPGTPYELSLHGVPPGGKPSDPIIYQGIMDKDEEKPGKSSGPPRLGELTVTDRTSDSLLLRWTVPEGEFDSFVIQYKDRDGQPQVVPVEGPQRSAVITSLDPGRKYKFVLYGFVGKKRHGPLVAEAKILPQSDPSPGTPPHLGNLWVTDPTPDSLHLSWTVPEGQFDTFMVQYRDRDGRPQVVPVEGPERSFVVSSLDPDHKYRFTLFGIANKKRYGPLTADGTTAPERKEEPPRPEFLEQPLLGELTVTGVTPDSLRLSWTVAQGPFDSFMVQYKDAQGQPQAVPVAGDENEVTVPGLDPDRKYKMNLYGLRGRQRVGPESVVAKTAPQEDVDETPSPTELGTEAPESPEEPLLGELTVTGSSPDSLSLFWTVPQGSFDSFTVQYKDRDGRPRAVRVGGKESEVTVGGLEPGHKYKMHLYGLHEGQRVGPVSAVGVTAPQQEETPPATESPLEPRLGELTVTDVTPNSVGLSWTVPEGQFDSFIVQYKDKDGQPQVVPVAADQREVTVYNLEPERKYKMNMYGLHDGQRMGPLSVVIVTAPLPPAPATEASKPPLEPRLGELTVTDITPDSVGLSWTVPEGEFDSFVVQYKDRDGQPQVVPVAADQREVTIPDLEPSRKYKFLLFGIQDGKRRSPVSVEAKTVARGDASPGAPPRLGELWVTDPTPDSLRLSWTVPEGQFDSFVVQFKDKDGPQVVPVEGHERSVTVTPLDAGRKYRFLLYGLLGKKRHGPLTADGTTEARSAMDDTGTKRPPKPRLGEELQVTTVTQNSVGLSWTVPEGQFDSFVVQYKDRDGQPQVVPVEGSLREVSVPGLDPAHRYKLLLYGLHHGKRVGPISAVAITAGREETETETTAPTPPAPEPHLGELTVEEATSHTLHLSWMVTEGEFDSFEIQYTDRDGQLQMVRIGGDRNDITLSGLESDHRYLVTLYGFSDGKHVGPVHVEALTVPEEEKPSEPPTATPEPPIKPRLGELTVTDATPDSLSLSWTVPEGQFDHFLVQYRNGDGQPKAVRVPGHEEGVTISGLEPDHKYKMNLYGFHGGQRMGPVSVVGVTAAEEETPSPTEPSMEAPEPAEEPLLGELTVTGSSPDSLSLSWTVPQGRFDSFTVQYKDRDGRPQVVRVGGEESEVTVGGLEPGRKYKMHLYGLHEGRRVGPVSAVGVTAPEEESPDAPLAKLRLGQMTVRDITSDSLSLSWTVPEGQFDHFLVQFKNGDGQPKAVRVPGHEDGVTISGLEPDHKYKMNLYGFHGGQRVGPVSAVGLTAPGKDEEMAPASTEPPTPEPPIKPRLEELTVTDATPDSLSLSWTVPEGQFDHFLVQYKNGDGQPKATRVPGHEDRVTISGLEPDNKYKMNLYGFHGGQRVGPVSAIGVTAAEEETPSPTEPSMEAPEPPEEPLLGELTVTGSSPDSLSLSWTVPQGRFDSFTVQYKDRDGRPQVVRVGGEESEVTVGGLEPGRKYKMHLYGLHEGRRVGPVSTVGVTAPQEDVDETPSPTEPGTEAPGPPEEPLLGELTVTGSSPDSLSLSWTVPQGRFDSFTVQYKDRDGRPQAVRVGGQESKVTVRGLEPGRKYKMHLYGLHEGRRLGPVSAVGVTEDEAETTQAVPTMTPEPPIKPRLGELTMTDATPDSLSLSWTVPEGQFDHFLVQYRNGDGQPKAVRVPGHEDGVTISGLEPDHKYKMNLYGFHGGQRVGPISVIGVTAAEEETPSPTELSTEAPEPPEEPLLGELTVTGSSPDSLSLSWTIPQGHFDSFTVQYKDRDGRPQVMRVRGEESEVTVGGLEPGRKYKMHLYGLHEGRRVGPVSTVGVTAPEDEAETTQAVPTTTPEPPNKPRLGELTVTDATPDSLSLSWMVPEGQFDHFLVQYRNGDGQPKVVRVPGHEDGVTISGLEPDHKYKMNLYGFHGGQRVGPISVIGVTAAEEETPAPTEPSTEAPEPPEEPLLGELTVTGSSPDSLSLSWTIPQGRFDSFTVQYKDRDGRPQVVRVRGEESEVTVGGLEPGCKYKMHLYGLHEGQRVGPVSAVGVTAPKDEAETTQAVPTMTPEPPIKPRLGELTVTDATPDSLSLSWMVPEGQFDHFLVQYRNGDGQPKAVRVPGHEDGVTISGLEPDHKYKMNLYGFHGGQRVGPVSAIGVTEEETPSPTEPSTEAPEAPEEPLLGELTVTGSSPDSLSLSWTVPQGRFDSFTVQYKDRDGQPQVVRVRGEESEVTVGGLEPGRKYKMHLYGLHEGQRVGPVSTVGITAPLPTPLPVEPRLGELAVAAVTSDSVGLSWTVAQGPFDSFLVQYRDAQGQPQAVPVSGDLRAVAVSGLDPARKYKFLLFGLQNGKRHGPVPVEARTAPDTKPSPRLGELTVTDATPDSVGLSWTVPEGEFDSFVVQYKDKDGRLQVVPVAANQREVTVQGLEPSRKYRFLLYGLSGRKRLGPISADSTTAPLEKELPPHLGELTVAEETSSSLRLSWTVAQGPFDSFVVQYRDTDGQPRAVPVAADQRTVTVEDLEPGKKYKFLLYGLLGGKRLGPVSALGMTAPEEDTPAPELAPEAPEPPEEPRLGVLTVTDTTPDSMRLSWSVAQGPFDSFVVQYEDTNGQPQALLVDGDQSKILISGLEPSTPYRFLLYGLHEGKRLGPLSAEGTTGLAPAGQTSEESRPRLSQLSVTDVTTSSLRLNWEAPPGAFDSFLLRFGVPSPSTLEPHPRPLLQRELMVPGTRHSAVLRDLRSGTLYSLTLYGLRGPHKADSIQGTARTLSPVLESPRDLQFSEIRETSAKVNWMPPPSRADSFKVSYQLADGGEPQSVQVDGQARTQKLQGLIPGARYEVTVVSVRGFEESEPLTGFLTTVPDGPTQLRALNLTEGFAVLHWKPPQNPVDTYDVQVTAPGAPPLQAETPGSAVDYPLHDLVLHTNYTATVRGLRGPNLTSPASITFTTGLEAPRDLEAKEVTPRTALLTWTEPPVRPAGYLLSFHTPGGQNQEILLPGGITSHQLLGLFPSTSYNARLQAMWGQSLLPPVSTSFTTGGLRIPFPRDCGEEMQNGAGASRTSTIFLNGNRERPLNVFCDMETDGGGWLVFQRRMDGQTDFWRDWEDYAHGFGNISGEFWLGNEALHSLTQAGDYSMRVDLRAGDEAVFAQYDSFHVDSAAEYYRLHLEGYHGTAGDSMSYHSGSVFSARDRDPNSLLISCAVSYRGAWWYRNCHYANLNGLYGSTVDHQGVSWYHWKGFEFSVPFTEMKLRPRNFRSPAGGG

SEQ ID NO: 13633 - protein, 842 aa, Homo Sapiens
MMPAQYALTSSLVLLVLLSTARAGPFSSRSNVTLPAPRPPPQPGGHTVGAGVGSPSSQLYEHTVEGGEKQVVFTHRINLPPSTGCGCPPGTEPPVLASEVQALRVRLEILEELVKGLKEQCTGGCCPASAQAGTGQTDVRTLCSLHGVFDLSRCTCSCEPGWGGPTCSDPTDAEIPPSSPPSASGSCPDDCNDQGRCVRGRCVCFPGYTGPSCGWPSCPGDCQGRGRCVQGVCVCRAGFSGPDCSQRSCPRGCSQRGRCEGGRCVCDPGYTGDDCGMRSCPRGCSQRGRCENGRCVCNPGYTGEDCGVRSCPRGCSQRGRCKDGRCVCDPGYTGEDCGTRSCPWDCGEGGRCVDGRCVCWPGYTGEDCSTRTCPRDCRGRGRCEDGECICDTGYSGDDCGVRSCPGDCNQRGRCEDGRCVCWPGYTGTDCGSRACPRDCRGRGRCENGVCVCNAGYSGEDCGVRSCPGDCRGRGRCESGRCMCWPGYTGRDCGTRACPGDCRGRGRCVDGRCVCNPGFTGEDCGSRRCPGDCRGHGLCEDGVCVCDAGYSGEDCSTRSCPGGCRGRGQCLDGRCVCEDGYSGEDCGVRQCPNDCSQHGVCQDGVCICWEGYVSEDCSIRTCPSNCHGRGRCEEGRCLCDPGYTGPTCATRMCPADCRGRGRCVQGVCLCHVGYGGEDCGQEEPPASACPGGCGPRELCRAGQCVCVEGFRGPDCAIQTCPGDCRGRGECHDGSCVCKDGYAGEDCGEEVPTIEGMRMHLLEETTVRTEWTPAPGPVDAYEIQFIPTASPLLCSASPHSPAKAEAEISTSWRNQDSLNFFFCLNIFFCCCYKNTLITRQEFGN

SEQ ID NO: 13634 - protein, 4244 aa, Homo Sapiens; identical to SEQ ID NO: 13632

SEQ ID NO: 13635 - protein, 1545 aa, Homo Sapiens
MMPAQYALTSSLVLLVLLSTARAGPFSSRSNVTLPAPRPPPQPGGHTVGAGVGSPSSQLYEHTVEGGEKQVVFTHRINLPPSTGCGCPPGTEPPVLASEVQALRVRLEILEELVKGLKEQCTGGCCPASAQAGTGQTDVRTLCSLHGVFDLSRCTCSCEPGWGGPTCSDPTDAEIPPSSPPSASGSCPDDCNDQGRCVRGRCVCFPGYTGPSCGWPSCPGDCQGRGRCVQGVCVCRAGFSGPDCSQRSCPRGCSQRGRCEGGRCVCDPGYTGDDCGMRSCPRGCSQRGRCENGRCVCNPGYTGEDCGVRSCPRGCSQRGRCKDGRCVCDPGYTGEDCGTRSCPWDCGEGGRCVDGRCVCWPGYTGEDCSTRTCPRDCRGRGRCEDGECICDTGYSGDDCGVRSCPGDCNQRGRCEDGRCVCWPGYTGTDCGSRACPRDCRGRGRCENGVCVCNAGYSGEDCGVRSCPGDCRGRGRCESGRCMCWPGYTGRDCGTRACPGDCRGRGRCVDGRCVCNPGFTGEDCGSRRCPGDCRGHGLCEDGVCVCDAGYSGEDCSTRSCPGGCRGRGQCLDGRCVCEDGYSGEDCGVRQCPNDCSQHGVCQDGVCICWEGYVSEDCSIRTCPSNCHGRGRCEEGRCLCDPGYTGPTCATRMCPADCRGRGRCVQGVCLCHVGYGGEDCGQEEPPASACPGGCGPRELCRAGQCVCVEGFRGPDCAIQTCPGDCRGRGECHDGSCVCKDGYAGEDCGEARVPSSASAYDQRGLAPGQEYQVTVRALRGTSWGLPASKTITTMIDGPQDLRVVAVTPTTLELGWLRPQAEVDRFVVSYVSAGNQRVRLEVPPEADGTLLTDLMPGVEYVVTVTAERGRAVSYPASVRANTEEREEESPPRPSLSQPPRRPWGNLTAELSRFRGTVQDLERHLRAHGYPLRANQTYTSVARHIHEYLQRQVLGSSADGALLVSLDGLRGQFERVVLRWRPQPPAEGPGGELTVPGTTRTVSLPDLRPGTTYHVEVHGVRAGQTSKSYAFITTTGPSTTQGAQAPLLQQRPQELGELRVLGRDETGRLRVVWTAQPDTFAYFQLRMRVPEGPGAHEEVLPGDVRQALVPPPPPGTPYELSLHGVPPGGKPSDPIIYQGIMDKDEEKPGKSSGPPRLGELTVTDRTSDSLLLRWTVPEGEFDSFVIQYKDRDGQPQVVPVEGPQRSAVITSLDPGRKYKFVLYGFVGKKRHGPLVAEAKILPQSDPSPGTPPHLGNLWVTDPTPDSLHLSWTVPEGQFDTFMVQYRDRDGRPQVVPVEGPERSFVVSSLDPDHKYRFTLFGIANKKRYGPLTADGTTAPERKEEPPRPEFLEQPLLGELTVTGVTPDSLRLSWTVAQGPFDSFMVQYKDAQGQPQAVPVAGDENEVTVPGLDPDRKYKMNLYGLRGRQRVGPESVVAKTAPQEDVDETPSPTELGTEAPESPEEPLLGELTVTGSSPDSLSLFWTVPQGSFDSFTVQYKDRDGRPRAVRVGGKESEVTVGGLEPGHKYKMHLYGLHEGQRVGPVSAVGVT

SEQ ID NO: 13636 - protein, 673 aa, Homo Sapiens
MRLSWSVAQGPFDSFVVQYEDTNGQPQALLVDGDQSKILISGLEPSTPYRFLLYGLHEGKRLGPLSAEGTTGLAPAGQTSEESRPRLSQLSVTDVTTSSLRLNWEAPPGAFDSFLLRFGVPSPSTLEPHPRPLLQRELMVPGTRHSAVLRDLRSGTLYSLTLYGLRGPHKADSIQGTARTLSPVLESPRDLQFSEIRETSAKVNWMPPPSRADSFKVSYQLADGGEPQSVQVDGQARTQKLQGLIPGARYEVTVVSVRGFEESEPLTGFLTTVPDGPTQLRALNLTEGFAVLHWKPPQNPVDTYDVQVTAPGAPPLQAETPGSAVDYPLHDLVLHTNYTATVRGLRGPNLTSPASITFTTGLEAPRDLEAKEVTPRTALLTWTEPPVRPAGYLLSFHTPGGQNQEILLPGGITSHQLLGLFPSTSYNARLQAMWGQSLLPPVSTSFTTGGLRIPFPRDCGEEMQNGAGASRTSTIFLNGNRERPLNVFCDMETDGGGWLVFQRRMDGQTDFWRDWEDYAHGFGNISGEFWLGNEALHSLTQAGDYSMRVDLRAGDEAVFAQYDSFHVDSAAEYYRLHLEGYHGTAGDSMSYHSGSVFSARDRDPNSLLISCAVSYRGAWWYRNCHYANLNGLYGSTVDHQGVSWYHWKGFEFSVPFTEMKLRPRNFRSPAGGG

SEQ ID NO: 13637 - protein, 1720 aa, Homo Sapiens
MAAAPSALLLLPPFPVLSTYRLQSRSRPSAPETDDSRVGGIMRGEKNYYFRGAAGDHGSCPTTTSPLASALLMPSEAVSSSWSESGGGLSGGDEEDTRLLQLLRTARDPSEAFQALQAALPRRGGRLGFPRRKEALYRALGRVLVEGGSDEKRLCLQLLSDVLRGQGEAGQLEEAFSLALLPQLVVSLREENPALRKDALQILHICLKRSPGEVLRTLIQQGLESTDARLRASTALLLPILLTTEDLLLGLDLTEVIISLARKLGDQETEEESETAFSALQQIGERLGQDRFQSYISRLPSALRRHYNRRLESQFGSQVPYYLELEASGFPEDPLPCAVTLSNSNLKFGIIPQELHSRLLDQEDYKNRTQAVEELKQVLGKFNPSSTPHSSLVGFISLLYNLLDDSNFKVVHGTLEVLHLLVIRLGEQVQQFLGPVIAASVKVLADNKLVIKQEYMKIFLKLMKEVGPQQVLCLLLEHLKHKHSRVREEVVNICICSLLTYPSEDFDLPKLSFDLAPALVDSKRRVRQAALEAFAVLASSMGSGKTSILFKAVDTVELQDNGDGVMNAVQARLARKTLPRLTEQGFVEYAVLMPSSAGGRSNHLAHGADTDWLLAGNRTQSAHCHCGDHVRDSMHIYGSYSPTICTRRVLSAGKGKNKLPWENEQPGIMGENQTSTSKDIEQFSTYDFIPSAKLKLSQGMPVNDDLCFSRKRVSRNLFQNSRDFNPDCLPLCAAGTTGTHQTNLSGKCAQLGFSQICGKTGSVGSDLQFLGTTSSHQEKVYASLNFGSKTQQTFGSQTECTSSNGQNPSPGAYILPSYPVSSPRTSPKHTSPLIISPKKSQDNSVNFSNSWPLKSFEGLSKPSPQKKLVSQKSSDPTGRNHGENSQEKPPVQLTPALVRSPSSRRGLNGTKPVPPIPRGISLLPDKADLSTVGHKKKEPDDIWKCEKDSLPIDLSELNFKDKDLDQEEMHSSLRSLRNSAAKKRAKLSGSTSDLESPDSAMKLDLTMDSPSLSSSPNINSYSESGVYSQESLTSSLSTTPQGKRIMSDIFPTFGSKPCPTRLSSAKKKISHIAEQSPSAGSSSNPQQISSFDFTTTKALSEDSVVVVGKGVFGSLSSAPATCSQSVISSVENGDTFSIKQSIEPPSGIYGRSVQQNISSYLDVENEKDAKVSISKSTYNKMRQKRKEEKELFHNKDCEKKEKNSWERMRHTGTEKMASESETPTGAISQYKERMPSVTHSPEIMDLSELRPFSKPEIALTEALRLLADEDWEKKIEGLNFIRCLAAFHSEILNTKLHETNFAVVQEVKNLRSGVSRAAVVCLSDLFTYLKKSMDQELDTTVKVLLHKAGESNTFIREDVDKALRAMVNNVTPARAVVSLINGGQRYYGRKMLFFMMCHPNFEKMLEKYVPSKDLPYIKDSVRNLQQKGLGEIPLDTPSAKGRRSHTGSVGNTRSSSVSRDAFNSAERAVTEVREVTRKSVPRNSLESAEYLKLITGLLNAKDFRDRINGIKQLLSDTENNQDLVVGNIVKIFDAFKSRLHDSNSKVNLVALETMHKMIPLLRDHLSPIINMLIPAIVDNNLNSKNPGIYAAATNVVQALSQHVDNYLLLQPFCTKAQFLNGKAKQDMTEKLADIVTELYQRKPHATEQKVLVVLWHLLGNMTNSGSLPGAGGNIRTATAKLSKALFAQMGQNLLNQAASQPPHIKKSLEELLDMTILNEL

SEQ ID NO: 13638 - protein, 1773 aa, Homo Sapiens
MAAAPSALLLLPPFPVLSTYRLQSRSRPSAPETDDSRVGGIMRGEKNYYFRGAAGDHGSCPTTTSPLASALLMPSEAVSSSWSESGGGLSGGDEEDTRLLQLLRTARDPSEAFQALQAALPRRGGRLGFPRRKEALYRALGRVLVEGGSDEKRLCLQLLSDVLRGQGEAGQLEEAFSLALLPQLVVSLREENPALRKDALQILHICLKRSPGEVLRTLIQQGLESTDARLRASTALLLPILLTTEDLLLGLDLTEVIISLARKLGDQETEEESETAFSALQQIGERLGQDRFQSYISRLPSALRRHYNRRLESQFGSQVPYYLELEASGFPEDPLPCAVTLSNSNLKFGIIPQELHSRLLDQEDYKNRTQAVEELKQVLGKFNPSSTPHSSLVGFISLLYNLLDDSNFKVVHGTLEVLHLLVIRLGEQVQQFLGPVIAASVKVLADNKLVIKQEYMKIFLKLMKEVGPQQVLCLLLEHLKHKHSRVREEVVNICICSLLTYPSEDFDLPKLSFDLAPALVDSKRRVRQAALEAFAVLASSMGSGKTSILFKAVDTVELQDNGDGVMNAVQARLARKTLPRLTEQGFVEYAVLMPSSAGGRSNHLAHGADTDWLLAGNRTQSAHCHCGDHVRDSMHIYGSYSPTICTRRVLSAGKGKNKLPWENEQPGIMGENQTSTSKDIEQFSTYDFIPSAKLKLSQGMPVNDDLCFSRKRVSRNLFQNSRDFNPDCLPLCAAGTTGTHQTNLSGKCAQLGFSQICGKTGSVGSDLQFLGTTSSHQEKVYASLNFGSKTQQTFGSQTECTSSNGQNPSPGAYILPSYPVSSPRTSPKHTSPLIISPKKSQDNSVNFSNSWPLKSFEGLSKPSPQKKLVSQKSSDPTGRNHGENSQEKPPVQLTPALVRSPSSRRGLNGTKPVPPIPRGISLLPDKADLSTVGHKKKEPDDIWKCEKDSLPIDLSELNFKDKDLDQEEMHSSLRSLRNSAAKKRAKLSGSTSDLESPDSAMKLDLTMDSPSLSSSPNINSYSESGVYSQESLTSSLSTTPQGKRIMSDIFPTFGSKPCPTRLSSAKKKISHIAEQSPSAGSSSNPQQISSFDFTTTKALSEDSVVVVGKGVFGSLSSAPATCSQSVISSVENGDTFSIKQSIEPPSGIYGRSVQQNISSYLDVENEKDAKVSISKSTYNKMRQKRKEEKELFHNKDCEKKEKNSWERMRHTGTEKMASESETPTGAISQYKERMPSVTHSPEIMDLSELRPFSKPEIALTEALRLLADEDWEKKIEGLNFIRCLAAFHSEILNTKLHETNFAVVQEVKNLRSGVSRAAVVCLSDLFTYLKKSMDQELDTTVKVLLHKAGESNTFIREDVDKALRAMVNNVTPARAVVSLINGGQSHLHIAVRRCTAQHLSDVLEFMEPERILSAAKDMAERILPAAAKFAQDSSQETRYYGRKMLFFMMCHPNFEKMLEKYVPSKDLPYIKDSVRNLQQKGLGEIPLDTPSAKGRRSHTGSVGNTRSSSVSRDAFNSAERAVTEVREVTRKSVPRNSLESAEYLKLITGLLNAKDFRDRINGIKQLLSDTENNQDLVVGNIVKIFDAFKSRLHDSNSKVNLVALETMHKMIPLLRDHLSPIINMLIPAIVDNNLNSKNPGIYAAATNVVQALSQHVDNYLLLQPFCTKAQFLNGKAKQDMTEKLADIVTELYQRKPHATEQKVLVVLWHLLGNMTNSGSLPGAGGNIRTATAKLSKALFAQMGQNLLNQAASQPPHIKKSLEELLDMTILNEL

SEQ ID NO: 13639 - protein, 995 aa, Homo Sapiens
MAAAPSALLLLPPFPVLSTYRLQSRSRPSAPETDDSRVGGIMRGEKNYYFRGAAGDHGSCPTTTSPLASALLMPSEAVSSSWSESGGGLSGGDEEDTRLLQLLRTARDPSEAFQALQAALPRRGGRLGFPRRKEALYRALGRVLVEGGSDEKRLCLQLLSDVLRGQGEAGQLEEAFSLALLPQLVVSLREENPALRKDALQILHICLKRSPGEVLRTLIQQGLESTDARLRASTALLLPILLTTEDLLLGLDLTEVIISLARKLGDQETEEESETAFSALQQIGERLGQDRFQSYISRLPSALRRHYNRRLESQFGSQVPYYLELEASGFPEDPLPCAVTLSNSNLKFGIIPQELHSRLLDQEDYKNRTQAVEELKQVLGKFNPSSTPHSSLVGFISLLYNLLDDSNFKVVHGTLEVLHLLVIRLGEQVQQFLGPVIAASVKVLADNKLVIKQEYMKIFLKLMKEVGPQQVLCLLLEHLKHKHSRVREEVVNICICSLLTYPSEDFDLPKLSFDLAPALVDSKRRVRQAALEAFAVLASSMGSGKTSILFKAVDTVELQDNGDGVMNAVQARLARKTLPRLTEQGFVEYAVLMPSSAGGRSNHLAHGADTDWLLAGNRTQSAHCHCGDHVRDSMHIYGSYSPTICTRRVLSAGKGKNKLPWENEQPGIMGENQTSTSKDIEQFSTYDFIPSAKLKLSQGMPVNDDLCFSRKRVSRNLFQNSRDFNPDCLPLCAAGTTGTHQTNLSGKCAQLGFSQICGKTGSVGSDLQFLGTTSSHQEKVYASLNFGSKTQQTFGSQTECTSSNGQNPSPGAYILPSYPVSSPRTSPKHTSPLIISPKKSQDNSVNFSNSWPLKSFEGLSKPSPQKKLVSQKSSDPTGRNHGENSQEKPPVQLTPALVRSPSSRRGLNGTKPVPPIPRGISLLPDKADLSTVGHKKKEPDDIWKCEKDSLPIDLSELNFKDKDLDQEEVRHISNIWVKTLSNKTFFCKEKNFSYC

SEQ ID NO: 13640 - protein, 174 aa, Homo Sapiens
MFSTYDFIPSAKLKLSQGMPVNDDLCFSRKRVSRNLFQNSRDFNPDCLPLCAAGTTGTHQTNLSGKCAQLGFSQICGKTGSVGSDLQFLGTTSSHQEKVYASLNFGSKTQQTFGSQTECTSSNGQNPSPGAYILPSYPVSSPRTSPKHTSPLIISPKKSQDNSVNFSNSWPLKS

SEQ ID NO: 13641 - protein, 155 aa, Homo Sapiens
SRLHDSNSKVNLVALETMHKMIPLLRDHLSPIINMLIPAIVDNNLNSKNPGIYAAATNVVQALSQHVDIVTELYQRKPHATEQKVLVVLWHLLGNMTNSGSLPGAGGNIRTATAKLSKALFAQMGQNLLNQAASQPPHIKKSLEELLDMTILNEL

SEQ ID NO: 13642 - protein, 160 aa, Homo Sapiens
  misc_feature (1)..(1): Xaa can be any naturally occurring amino acid
XFSRKRVSRNLFQNSRDFNPDCLPLCAAGTTGTHQTNLSGKCAQLGFSQICGKTGSVGSDLQFLGTTSSHQEKGENSQEKPPVQLTPALVRSPSSRRGLNGTKPVPPIPRGISLLPDKADLSTVGHKKKEPDDIWKCEKDSLPIDLSELNFKDKDLDQEE

SEQ ID NO: 13643 - protein, 51 aa, Homo Sapiens
MIIIIVVGCLCFLTCTMKGLDDFYYCPHFTGFKRGADPGMPEPTVLSLLWG

SEQ ID NO: 13644 - protein, 55 aa, Homo Sapiens [sequence omitted]

SEQ ID NO: 13645 - protein, 125 aa, Homo Sapiens
MVKLSKEAKQRLQQLFKGSQFAIRWGFIPLVIYLGFKRGADPGMPEPTVLRVWWLTPVISALWKAKVGRSWEDCLKLGVQDQPGQRSETHLYQKKKTYFGDKGLFGLLDLEAISGQHGRCVLWLG

SEQ ID NO: 13646 - protein, 55 aa, Homo Sapiens
MVKLSKEAKQRLQQLFKGSQFAIRWGFIPLVIYLGFKRGADPGMPEPTVLSLLWG

SEQ ID NO: 13647 - protein, 49 aa, Homo Sapiens
ATFYGRMLDHEYTTKEVFRKNFFNDWRKAPLLDPLLWPDATPLPFTTAL

SEQ ID NO: 13648 - protein, 164 aa, Homo Sapiens
MKSHPRKKAKNSQKGPFRNVCCTCFPLSDPSETSCCSEDTHPSRPGPPGPQQHYLAGVTCRSPGSGRWEKEKHEDGVKWRQLEHKGPYFAPPYEPLPDGVRFFYEGRPVRLSVAAEEVATFYGRMLDHEYTTKEVFRKNFFNDWRKEMAVEEREVIKSLDKCDF

SEQ ID NO: 13649 - protein, 134 aa, Homo Sapiens
MKSHPRKKAKWEKEKHEDGVKWRQLEHKGPYFAPPYEPLPDGVRFFYEGRPVRLSVAAEEVATFYGRMLDHEYTTKEVFRKNFFNDWRKEMAVEEREVIKSLDKCDFTEIHRYFVDKAAARKVLSREEKQKLKE

SEQ ID NO: 13650 - protein, 33 aa, Homo Sapiens
MLDHEYTTKEVFRKNFFNDWRKEMAVEEREVIK

SEQ ID NO: 13651 - protein, 201 aa, Homo Sapiens
MLDHEYTTKEVFRKNFFNDWRKEMAVEEREVIKSLDKCDFTEIHRYFVDKAAARKVLSREEKQKLKEEAEKLQQEFGYCILDGHQEKIGNFKIEPPGLFRGRGDHPKMGMLKRRITPEDVVINCSRDSKIPEPPAGHQWKEVRSDNTVTWLAAWTESVQNSIKYIMLNPCSKLKGETAWQKFETARRLRGFVDEIRSQYRA

SEQ ID NO: 13652 - protein, 221 aa, Homo Sapiens
MLDHEYTTKEVFRKNFFNDWRKEMAVEEREVIKSLDKCDFTEIHRYFVDKAAARKVLSREEKQKLKEEAEKLQQEFGYCILDGHQEKIGNFKIEPPGLFRGRGDHPKMGMLKRRITPEDVVINCSRDSKIPEPPAGHQWKEVRSDNTVTWLAAWTESVQNSIKYIMLNPCSKLKGETAWQKFETARRLRGFVDEIRSQYRADWKSREMKTRQRAVALYFID

SEQ ID NO: 13653 - protein, 376 aa, Homo Sapiens
MLDHEYTTKEVFRKNFFNDWRKEMAVEEREVIKSLDKCDFTEIHRYFVDKAAARKVLSREEKQKLKEEAEKLQQEFGYCILDGHQEKIGNFKIEPPGLFRGRGDHPKMGMLKRRITPEDVVINCSRDSKIPEPPAGHQWKEVRSDNTVTWLAAWTESVQNSIKYIMLNPCSKLKGETAWQKFETARRLRGFVDEIRSQYRADWKSREMKTRQRAVALYFIDKLALRAGNEKEDGEAADTVGCCSLRVEHVQLHPEADGCQHVVEFDFLGKDCIRYYNRVPVEKPVYKNLQLFMENKDPRDDLFDRLTVSWDGPAKPRNYRDHFPPQTTSLNKHLQELMDGLTAKVFRTYNASITLQEQLRALTRAEDSIAAKILSY

SEQ ID NO: 13654 - protein, 503 aa, Homo Sapiens
MLDHEYTTKEVFRKNFFNDWRKEMAVEEREVIKSLDKCDFTEIHRYFVDKAAARKVLSREEKQKLKEEAEKLQQEFGYCILDGHQEKIGNFKIEPPGLFRGRGDHPKMGMLKRRITPEDVVINCSRDSKIPEPPAGHQWKEVRSDNTVTWLAAWTESVQNSIKYIMLNPCSKLKGETAWQKFETARRLRGFVDEIRSQYRADWKSREMKTRQRAVALYFIDKLALRAGNEKEDGEAADTVGCCSLRVEHVQLHPEADGCQHVVEFDFLGKDCIRYYNRVPVEKPVYKNLQLFMENKDPRDDLFDRLTTTSLNKHLQELMDGLTAKVFRTYNASITLQEQLRALTRAEDSIAAKILSYNRANRVVAILCNHQRATPSTFEKSMQNLQTKIQAKKEQVAEARAELRRARAEHKAQGDGKSRSVLEKKRRLLEKLQEQLAQLSVQATDKEENKQVALGTSKLNYLDPRISIAWCKRFRVPVEKIYSKTQRERFAWALAMAGEDFEF

SEQ ID NO: 13655 - protein, 503 aa, Homo Sapiens; identical to SEQ ID NO: 13654

SEQ ID NO: 13656 - protein, 503 aa, Homo Sapiens; identical to SEQ ID NO: 13654

SEQ ID NO: 13657 - protein, 164 aa, Homo Sapiens
MRVVRLLRLRAALTLLGEVPRRPASRGVPGSRRTQKGSGARNSQKGPFRNVCCTCFPLSDPSETSCCSEDTHPSRPGPPGPQQHYLAGVTCRSPGSGRWEKEKHEDGVKWRQLEHKGPYFAPPYEPLPDGVRFFYEGRPVRLSVAAEEVATFYGRMLDHEYTTK

SEQ ID NO: 13658 - protein, 601 aa, Homo Sapiens
MRVVRLLRLRAALTLLGEVPRRPASRGVPGSRRTQKGSGARWEKEKHEDGVKWRQLEHKGPYFAPPYEPLPDGVRFFYEGRPVRLSVAAEEVATFYGRMLDHEYTTKEVFRKNFFNDWRKEMAVEEREVIKSLDKCDFTEIHRYFVDKAAARKVLSREEKQKLKEEAEKLQQEFGYCILDGHQEKIGNFKIEPPGLFRGRGDHPKMGMLKRRITPEDVVINCSRDSKIPEPPAGHQWKEVRSDNTVTWLAAWTESVQNSIKYIMLNPCSKLKGETAWQKFETARRLRGFVDEIRSQYRADWKSREMKTRQRAVALYFIDKLALRAGNEKEDGEAADTVGCCSLRVEHVQLHPEADGCQHVVEFDFLGKDCIRYYNRVPVEKPVYKNLQLFMENKDPRDDLFDRLTTTSLNKHLQELMDGLTAKVFRTYNASITLQEQLRALTRAEDSIAAKILSYNRANRVVAILCNHQRATPSTFEKSMQNLQTKIQAKKEQVAEARAELRRARAEHKAQGDGKSRSVLEKKRRLLEKLQEQLAQLSVQATDKEENKQVALGTSKLNYLDPRISIAWCKRFRVPVEKIYSKTQRERFAWALAMAGEDFEF

SEQ ID NO: 13659 - protein, 167 aa, Homo Sapiens
MRVVRLLRLRAALTLLGEVPRRPASRGVPGSRRTQKGSGARWEKEKHEDGVKWRQLEHKGPYFAPPYEPLPDGVRFFYEGRPVRLSVAAEEVATFYGRMLDHEYTTKEVFRKNFFNDWRKEMAVEEREVIKSLDKCDFTEIHRYFVDKAAARKVLSREEKQMVTKKK

SEQ ID NO: 13660 - protein, 111 aa, Homo Sapiens
  misc_feature (1)..(1): Xaa can be any naturally occurring amino acid
XEQVAEARAELRRARAEHKAQGDGKSRSVLEKKRRLLEKLQEQLAQLSVQATDKEENKQVALGTSKLNYLDPRISIAWCKRFRVPVEKIYSKTQRERFAWALAMAGEDFEF

SEQ ID NO: 13661 - protein, 123 aa, Homo Sapiens
  misc_feature (1)..(1): Xaa can be any naturally occurring amino acid
XLRLRAALTLLGEVPRRPASRGVPGSRRTQKGSGARWEKEKHEDGVKWRQLEHKGPYFAPPYEPLPDGVRFFYEGRPVRLSVAAEEVATFYGRMLDHEYTTKEVFRKNFFNDWRKVLCQTHML

SEQ ID NO: 13662 - protein, 332 aa, Homo Sapiens
MKLGRAVLGLLLLAPSVVQAVEPISLGLALAGVLTGYIYPRLYCLFAECCGQKRSLSREALQKDLDDNLFGQHLAKKIILNAVFGFINNPKPKKPLTLSLHGWTGTGKNFVSKIIAENIYEGGLNSDYVHLFVATLHFPHASNITLYKDQLQLWIRGNVSACARSIFIFDEMDKMHAGLIDAIKPFLDYYDLVDGVSYQKAMFIFLSNAGAERITDVALDFWRSGKQREDIKLKDIEHALSVSVFNNKNSGFWHSSLIDRNLIDYFVPFLPLEYKHLKMCIRVEMQSRGYEIDEDIVSRVAEEMTFFPKEERVFSDKGCKTVFTKLDYYYDD

SEQ ID NO: 13663 - protein, 336 aa, Homo Sapiens
MLRAGWLRGAAALALLLAARVVAAFEPITVGLAIGAASAITGYLSYNDIYCRFAECCREERPLNASALKLDLEEKLFGQHLATEVIFKALTGFRNNKNPKKPLTLSLHGWAGTGKNFVSQIVAENLHPKGLKSNFVHLFVSTLHFPHEQKIKLYQDQLQKWIRGNVSACANSVFIFDEMDKLHPGIIDAIKPFLDYYEQVDGVSYRKAIFIFLSNAGGDLITKTALDFWRAGRKREDIQLKDLEPVLSVGVFNNKHSGLWHSGLIDKNLIDYFIPFLPLEYRHVKMCVRAEMRARGSAIDEDIVTRVAEEMTFFPRDEKIYSDKGCKTVQSRLDFH

SEQ ID NO: 13664 - protein, 141 aa, Homo Sapiens
  misc_feature (1)..(1): Xaa can be any naturally occurring amino acid
XRVVAAFEPITVGLAIGAASAITGYLSYNDIYCRFAECCREERPLNASALKLDLEEKLFGQHLATEVIFKALTGFRNNKNPKKPLTLSLHGWAGTGKNFVSQIVAENLHPKGLKSNFVHLFVSTLHFPHEQKIKLYQSSLT

SEQ ID NO: 13665 - protein, 72 aa, Homo Sapiens
MAAATRGCRPWGSLLGLLGLVSAAAAAWDLASLRCTLGAFCECDFRPDLPEGSEELGPREPHCLWPLPLPLR

SEQ ID NO: 13666 - protein, 72 aa, Homo Sapiens; identical to SEQ ID NO: 13665

SEQ ID NO: 13667 - protein, 72 aa, Homo Sapiens; identical to SEQ ID NO: 13665

SEQ ID NO: 13668 - protein, 72 aa, Homo Sapiens; identical to SEQ ID NO: 13665

SEQ ID NO: 13669 - protein, 253 aa, Homo Sapiens
MAAATRGCRPWGSLLGLLGLVSAAAAAWDLASLRCTLGAFCECDFRPDLPGLECDLAQHLAGQHLAKALVVKALKAFVRDPAPTKPLVLSLHGWTGTGKSYVSSLLAHYLFQGGLRSPRVHHFSPVLHFPHPSHIERYKKDLKSWVQGNLTACGRSLFLFDEMDKMPPGLMEVLRPFLGSSWVVYGTNYRKAIFIFIRWGPALQWAQWGGHFSEVQLYSLSLCSQQNPVPHGLSWAFPVPSATLRDDIVIPPG

SEQ ID NO: 13670 - protein, 242 aa, Homo Sapiens
MAAATRGCRPWGSLLGLLGLVSAAAAAWDLASLRCTLGAFCECDFRPDLPGLECDLAQHLAGQHLAKALVVKALKAFVRDPAPTKPLVLSLHGWTGTGKSYVSSLLAHYLFQGGLRSPRVHHFSPVLHFPHPSHIERYKKDLKSWVQGNLTACGRSLFLFDEMDKMPPGLMEVLRPFLGSSWVVYGTNYRKAIFIFIRWLLKLGHHGRAPPRRSGALPPAPAAPRPALRAQRAGPAGPGAKG

SEQ ID NO: 13671 - protein, 321 aa, Homo Sapiens
MAAATRGCRPWGSLLGLLGLVSAAAAAWDLASLRCTLGAFCECDFRPDLPGLECDLAQHLAGQHLAKALVVKALKAFVRDPAPTKPLVLSLHGWTGTGKSYVSSLLAHYLFQGGLRSPRVHHFSPVLHFPHPSHIERYKKDLKSWVQGNLTACGRSLFLFDEMDKMPPGLMEVLRPFLGSSWVVYGTNYRKAIFIFISNTGGKQINQVALEAWRSRRDREEILLQELEPVISRAVLDNPHHGFSNSGIMEERLLDAVVPFLPLQRHHVRHCVLNELAQLGLEPRDEVVQAVLDSTTFFPEDEQLFSSNGCKTVASRIAFFL

SEQ ID NO: 13672 - protein, 174 aa, Homo Sapiens
MGLCVPFAVTTSFLSLGLEWDLNVRLHGQHLVQQLVLRTVRGYLETPQPEKALALSFHGWSGTGKNFVARMLVENLYRDGLMSDCVRMFIATFHFPHPKYVDLYKEQLMSQIRETQQLCHQTLFIFDEAEKLHPGLLEVLGPHLERRAPEGHRAESPWTIFLFLSNLRGDIINE

SEQ ID NO: 13673 - protein, 97 aa, Homo Sapiens
MLRGPWRQLWLFFLLLLPGAPEPRGASRPWEGTDEPGSAWAWPGFQRLQEQLRAAGALSKRYWTLFSCQVWPDDCDEDEEAATGPLALGNVRCGHAW

SEQ ID NO: 13674 - protein, 153 aa, Homo Sapiens
MLRGPWRQLWLFFLLLLPGAPEPRGASRPWEGTDEPGSAWAWPGFQRLQEQLRAAGALSKRYWTLFSCQVWPDDCDEDEEAATGPLGWRLPLLGQRYLDLLTTWYCSFKDCCPRGDCRISNNFTGKNFVARMLVENLYRDGLMSDCVRMFIAT

SEQ ID NO: 13675 - protein, 397 aa, Homo Sapiens
MLRGPWRQLWLFFLLLLPGAPEPRGASRPWEGTDEPGSAWAWPGFQRLQEQLRAAGALSKRYWTLFSCQVWPDDCDEDEEAATGPLGWRLPLLGQRYLDLLTTWYCSFKDCCPRGDCRISNNFTGLEWDLNVRLHGQHLVQQLVLRTVRGYLETPQPEKALALSFHGWSGTGKNFVARMLVENLYRDGLMSDCVRMFIATFHFPHPKYVDLYKEQLMSQIRETQQLCHQTLFIFDEAEKLHPGLLEVLGPHLERRAPEGHRAESPWTIFLFLSNLRGDIINEVVLKLLKAGWSREEITMEHLEPHLQAEIVETIDNGFGHSRLVKENLIDYFIPFLPLEYRHVRLCARDAFLSQELLYKEETLDEIAQMMVYVPKEEQLFSSQGCKSISQRINYFLS

SEQ ID NO: 13676 - protein, 336 aa, Homo Sapiens
MLRGPWRQLWLFFLLLLPGAPEPRGASRPWEGTDEPGSAWAWPGFQRLQEQLRAAGALSKRYWTLFSCQVWPDDCDEDEEAATGPLGWRLPLLGQRYLDLLTTWYCSFKDCCPRGDCRISNNFTGLEWDLNVRLHGQHLVQQLVLRTVRGYLETPQPEKALALSFHGWSGTGKNFVARMLVENLYRDGLMSDCVRMFIATFHFPHPKYVDLYKEQLMSQIRETQQLCHQTLFIFDEAEKLHPGLLEVLGPHLERRAPEGHRAESPWTIFLFLSNLRGDIINEVVLKLLKAGWSREEITMEHLEPHLQAEIVETIGFSFLTTRWPHLDLPTSSVAPT

SEQ ID NO: 13677 - protein, 151 aa, Homo Sapiens
MDCREMDLYEDYQSPFDFDAGVNKSYLYLSPSGNSSPPGSPTLQKFGLLRTDPVPEEGEDVAATISATETLSEEEQEELRRELAKVEEEIQTLSQVLAAKEKHLAEIKRKLGINSLQELKQNIAKGWQDVTATSARSKLLAAETELLCLLY

SEQ ID NO: 13678 - protein, 233 aa, Homo Sapiens
MDCREMDLYEDYQSPFDFDAGVNKSYLYLSPSGNSSPPGSPTLQKFGLLRTDPVPEEGEDVAATISATETLSEEEQEELRRELAKVEEEIQTLSQVLAAKEKHLAEIKRKLGINSLQELKQNIAKGWQDVTATSAYKKTSETLSQAGQKASAAFSSVGSVITKKLEDVKLQAFSHSFRNSPTFKSFEEKVENLKSKVGGTKPAGGDFGEVLNSAANASATTTEPLPEKTQESL

SEQ ID NO: 13679 - protein, 247 aa, Homo Sapiens
MDCREMDLYEDYQSPFDFDAGVNKSYLYLSPSGNSSPPGSPTLQKFGLLRTDPVPEEGEDVAATISATETLSEEEQEELRRELAKVEEEIQTLSQVLAAKEKHLAEIKRKLGINSLQELKQNIAKGWQDVTATSAYKKTSETLSQAGQKASAAFSSVGSVITKKLEDVKLQAFSHSFSIRSIQHSISMPAMRNSPTFKSFEEKVENLKSKVGGTKPAGGDFGEVLNSAANASATTTEPLPEKTQESL

SEQ ID NO: 13680 - protein, 224 aa, Homo Sapiens
MDCREMDLYEDYQSPFDFDAGVNKSYLYLSPSGNSSPPGSPTLQKFGLLRTDPVPEEGEDVAATISATETLSEEEQEELRRELAKVEEEIQTLSQVLAAKEKHLAEIKRKLGINSLQELKQNIAKGWQDVTATSAYKKTSETLSQAGQKASAAFSSVGSVITKKLEDVKNSPTFKSFEEKVENLKSKVGGTKPAGGDFGEVLNSAANASATTTEPLPEKTQESL

SEQ ID NO: 13681 - protein, 238 aa, Homo Sapiens
MDCREMDLYEDYQSPFDFDAGVNKSYLYLSPSGNSSPPGSPTLQKFGLLRTDPVPEEGEDVAATISATETLSEEEQEELRRELAKVEEEIQTLSQVLAAKEKHLAEIKRKLGINSLQELKQNIAKGWQDVTATSAYKKTSETLSQAGQKASAAFSSVGSVITKKLEDVNIRSIQHSISMPAMRNSPTFKSFEEKVENLKSKVGGTKPAGGDFGEVLNSAANASATTTEPLPEKTQESL

SEQ ID NO: 13682 - protein, 38 aa, Homo Sapiens
MDRGEQAFYFIWNFWLELGKDLSFLHSYKMSAENRPSP

SEQ ID NO: 13683 - protein, 38 aa, Homo Sapiens; identical to SEQ ID NO: 13682

SEQ ID NO: 13684 - protein, 111 aa, Homo Sapiens
MDRGEQGLLRTDPVPEEGEDVAATISATETLSEEEQEELRRELAKVEEEIQTLSQVLAAKEKHLAEIKRKLGINSLQELKQNIAKGWQDVTATSARSKLLAAETELLCLLY

SEQ ID NO: 13685 - protein, 207 aa, Homo Sapiens
MDRGEQGLLRTDPVPEEGEDVAATISATETLSEEEQEELRRELAKVEEEIQTLSQVLAAKEKHLAEIKRKLGINSLQELKQNIAKGWQDVTATSAYKKTSETLSQAGQKASAAFSSVGSVITKKLEDVKLQAFSHSFSIRSIQHSISMPAMRNSPTFKSFEEKVENLKSKVGGTKPAGGDFGEVLNSAANASATTTEPLPEKTQESL

SEQ ID NO: 13686 - protein, 184 aa, Homo Sapiens
MDRGEQGLLRTDPVPEEGEDVAATISATETLSEEEQEELRRELAKVEEEIQTLSQVLAAKEKHLAEIKRKLGINSLQELKQNIAKGWQDVTATSAYKKTSETLSQAGQKASAAFSSVGSVITKKLEDVKNSPTFKSFEEKVENLKSKVGGTKPAGGDFGEVLNSAANASATTTEPLPEKTQESL

SEQ ID NO: 13687 - protein, 61 aa, Homo Sapiens
MDRGEQGRRRNPDSVSSVSSKREASSRDQAETWNQFSTGTKTEHCQRVARRDSNICLQEDI

SEQ ID NO: 13688 - protein, 60 aa, Homo Sapiens
MPAMRNSPTFKSFEEKVENLKSKVGGTKPAGGDFGEVLNSAANASATTTEPLPEKTQESL

SEQ ID NO: 13689 - protein, 148 aa, Homo Sapiens
  misc_feature (1)..(1): Xaa can be any naturally occurring amino acid
XGLGLGLWLGAGLSAARRLEQVPSLLGRRRKLHLPDPDLASWGPGRSGSGGGRWDCMCECLLRTDPVPEEGEDVAATISATETLSEEEQEELRRELAKVEEEIQTLSQVLAAKEKHLAEIKRKLGINSLQELKQNIAKGWQDVTATSA

SEQ ID NO: 13690 - protein, 172 aa, Homo Sapiens
MRALAVLSVTLVMACTEAFFPFISRGKELLWGKPEESRVSSVLEESKRLVDTAMYATMQRNLKKRGILSPAQLLSFSKLPEPTSGVIARAAEIMETSIQAMKRKVNLKTQQSQHPTDALSEDLLSIIANMSGCLPYMLPPKCPNTCLANKYRPITGACNNRDHPRWGASNTA

SEQ ID NO: 13691 - protein, 933 aa, Homo Sapiens
MRALAVLSVTLVMACTEAFFPFISRGKELLWGKPEESRVSSVLEESKRLVDTAMYATMQRNLKKRGILSPAQLLSFSKLPEPTSGVIARAAEIMETSIQAMKRKVNLKTQQSQHPTDALSEDLLSIIANMSGCLPYMLPPKCPNTCLANKYRPITGACNNRDHPRWGASNTALARWLPPVYEDGFSQPRGWNPGFLYNGFPLPPVREVTRHVIQVSNEVVTDDDRYSDLLMAWGQYIDHDIAFTPQSTSKAAFGGGADCQMTCENQNPCFPIQLPEEARPAAGTACLPFYRSSAACGTGDQGALFGNLSTANPRQQMNGLTSFLDASTVYGSSPALERQLRNWTSAEGLLRVHARLRDSGRAYLPFVPPRAPAACAPEPGIPGETRGPCFLAGDGRASEVPSLTALHTLWLREHNRLAAALKALNAHWSADAVYQEARKVVGALHQIITLRDYIPRILGPEAFQQYVGPYEGYDSTANPTVSNVFSTAAFRFGHATIHPLVRRLDASFQEHPDLPGLWLHQAFFSPWTLLRGGGLDPLIRGLLARPAKLQVQDQLMNEELTERLFVLSNSSTLDLASINLQRGRDHGLPGYNEWREFCGLPRLETPADLSTAIASRSVADKILDLYKHPDNIDVWLGGLAENFLPRARTGPLFACLIGKQMKALRDGDWFWWENSHVFTDAQRRELEKHSLSRVICDNTGLTRVPMDAFQVGKFPEDFESCDSITGMNLEAWRETFPQDDKCGFPESVENGDFVHCEESGRRVLVYSCRHGYELQGREQLTCTQEGWDFQPPLCKDVNECADGAHPPCHASARCRNTKGGFQCLCADPYELGDDGRTCVDSGRLPRVTWISMSLAALLIGGFAGLTSTVICRWTRTGTKSTLPISETGGGTPELRCGKHQAVGTSPQRAAAQDSEQESAGMEGRDTHRLPRAL

SEQ ID NO: 13692 - protein, 933 aa, Homo Sapiens; identical to SEQ ID NO: 13691

SEQ ID NO: 13693 - protein, 889 aa, Homo Sapiens
MRALAVLSVTLVMACTEAFFPFISRGKELLWGKPEESRVSSVLEESKRLVDTAMYATMQRNLKKRGILSPAQLLSFSKLPEPTSGVIARAAEIMETSIQAMKRKVNLKTQQSQHPTDALSEDLLSIIANMSGCLPYMLPPKCPNTCLANKYRPITGACNNRDHPRWGASNTALARWLPPVYEDGFSQPRGWNPGFLYNGFPLPPVREVTRHVIQVSNEVVTDDDRYSDLLMAWGQYIDHDIAFTPQSTSKAAFGGGADCQMTCENQNPCFPIQLPEEARPAAGTACLPFYRSSAACGTGDQGALFGNLSTANPRQQMNGLTSFLDASTVYGSSPALERQLRNWTSAEGLLRVHARLRDSGRAYLPFVPPRAPAACAPEPGIPGETRGPCFLAGDGRASEVPSLTALHTLWLREHNRLAAALKALNAHWSADAVYQEARKVVGALHQIITLRDYIPRILGPEAFQQYVGPYEGYDSTANPTVSNVFSTAAFRFGHATIHPLVRRLDASFQEHPDLPGLWLHQAFFSPWTLLRGGGLDPLIRGLLARPAKLQVQDQLMNEELTERLFVLSNSSTLDLASINLQRGRDHGLPGYNEWREFCGLPRLETPADLSTAIASRSVADKILDLYKHPDNIDVWLGGLAENFLPRARTGPLFACLIGKQMKALRDGDWFWWENSHVFTDAQRRELEKHSLSRVICDNTGLTRVPMDAFQVGKFPEDFESCDSITGMNLEAWRETFPQDDKCGFPESVENGDFVHCEESGRRVLVYSCRHGYELQGREQLTCTQEGWDFQPPLCKDSGRLPRVTWISMSLAALLIGGFAGLTSTVICRWTRTGTKSTLPISETGGGTPELRCGKHQAVGTSPQRAAAQDSEQESAGMEGRDTHRLPRAL

SEQ ID NO: 13694 - protein, 876 aa, Homo Sapiens
MRALAVLSVTLVMACTEAFFPFISRGKELLWGKPEESRVSSVLEESKRLVDTAMYATMQRNLKKRGILSPAQLLSFSKLPEPTSGVIARAAEIMETSIQAMKRKVNLKTQQSQHPTDALSEDLLSIIANMSGCLPYMLPPKCPNTCLANKYRPITGACNNRDHPRWGASNTALARWLPPVYEDGFSQPRGWNPGFLYNGFPLPPVREVTRHVIQVSNEVVTDDDRYSDLLMAWGQYIDHDIAFTPQSTSKAAFGGGADCQMTCENQNPCFPIQLPEEARPAAGTACLPFYRSSAACGTGDQGALFGNLSTANPRQQMNGLTSFLDASTVYGSSPALERQLRNWTSAEGLLRVHARLRDSGRAYLPFVPPRAPAACAPEPGIPGETRGPCFLAGDGRASEVPSLTALHTLWLREHNRLAAALKALNAHWSADAVYQEARKVVGALHQIITLRDYIPRILGPEAFQQYVGPYEGYDSTANPTVSNVFSTAAFRFGHATIHPLVRRLDASFQEHPDLPGLWLHQAFFSPWTLLRGGYNEWREFCGLPRLETPADLSTAIASRSVADKILDLYKHPDNIDVWLGGLAENFLPRARTGPLFACLIGKQMKALRDGDWFWWENSHVFTDAQRRELEKHSLSRVICDNTGLTRVPMDAFQVGKFPEDFESCDSITGMNLEAWRETFPQDDKCGFPESVENGDFVHCEESGRRVLVYSCRHGYELQGREQLTCTQEGWDFQPPLCKDVNECADGAHPPCHASARCRNTKGGFQCLCADPYELGDDGRTCVDSGRLPRVTWISMSLAALLIGGFAGLTSTVICRWTRTGTKSTLPISETGGGTPELRCGKHQAVGTSPQRAAAQDSEQESAGMEGRDTHRLPRAL

SEQ ID NO: 13695 - protein, 760 aa, Homo Sapiens
MRALAVLSVTLVMACTEAFFPFISRGKELLWGKPEESRVSSVLEESKRLVDTAMYATMQRNLKKRGILSPAQLLSFSKLPEPTSGVIARAAEIMETSIQAMKRKVNLKTQQSQHPTDALSEDLLSIIANMSGCLPYMLPPKCPNTCLANKYRPITGACNNRDHPRWGASNTALARWLPPVYEDGFSQPRGWNPGFLYNGFPLPPVREVTRHVIQVSNEVVTDDDRYSDLLMAWGQYIDHDIAFTPQSTSKAAFGGGADCQMTCENQNPCFPIQIITLRDYIPRILGPEAFQQYVGPYEGYDSTANPTVSNVFSTAAFRFGHATIHPLVRRLDASFQEHPDLPGLWLHQAFFSPWTLLRGGGLDPLIRGLLARPAKLQVQDQLMNEELTERLFVLSNSSTLDLASINLQRGRDHGLPGYNEWREFCGLPRLETPADLSTAIASRSVADKILDLYKHPDNIDVWLGGLAENFLPRARTGPLFACLIGKQMKALRDGDWFWWENSHVFTDAQRRELEKHSLSRVICDNTGLTRVPMDAFQVGKFPEDFESCDSITGMNLEAWRETFPQDDKCGFPESVENGDFVHCEESGRRVLVYSCRHGYELQGREQLTCTQEGWDFQPPLCKDVNECADGAHPPCHASARCRNTKGGFQCLCADPYELGDDGRTCVDSGRLPRVTWISMSLAALLIGGFAGLTSTVICRWTRTGTKSTLPISETGGGTPELRCGKHQAVGTSPQRAAAQDSEQESAGMEGRDTHRLPRAL

SEQ ID NO: 13696 - protein, 174 aa, Homo Sapiens
MRALAVLSVTLVMACTEAFFPFISRGKELLWGKPEESRVSSVLEESKRLVDTAMYATMQRNLKKRGILSPAQLLSFSKLPEPTSGVIARAAEIMETSIQAMKRKVNLKTQQSQHPTDALSEDLLSIIANMSGCLPYMLPPKCPNTCLANKYRPITGACNNRKMKYKPDHSETAN

SEQ ID NO: 13697 - protein, 174 aa, Homo Sapiens; identical to SEQ ID NO: 13696

SEQ ID NO: 13698 - protein, 864 aa, Homo Sapiens
QLLSFSKLPEPTSGVIARAAEIMETSIQAMKRKVNLKTQQSQHPTDALSEDLLSIIANMSGCLPYMLPPKCPNTCLANKYRPITGACNNRDHPRWGASNTALARWLPPVYEDGFSQPRGWNPGFLYNGFPLPPVREVTRHVIQVSNEVVTDDDRYSDLLMAWGQYIDHDIAFTPQSTSKAAFGGGADCQMTCENQNPCFPIQLPEEARPAAGTACLPFYRSSAACGTGDQGALFGNLSTANPRQQMNGLTSFLDASTVYGSSPALERQLRNWTSAEGLLRVHARLRDSGRAYLPFVPPRAPAACAPEPGIPGETRGPCFLAGDGRASEVPSLTALHTLWLREHNRLAAALKALNAHWSADAVYQEARKVVGALHQIITLRDYIPRILGPEAFQQYVGPYEGYDSTANPTVSNVFSTAAFRFGHATIHPLVRRLDASFQEHPDLPGLWLHQAFFSPWTLLRGGGLDPLIRGLLARPAKLQVQDQLMNEELTERLFVLSNSSTLDLASINLQRGRDHGLPGYNEWREFCGLPRLETPADLSTAIASRSVADKILDLYKHPDNIDVWLGGLAENFLPRARTGPLFACLIGKQMKALRDGDWFWWENSHVFTDAQRRELEKHSLSRVICDNTGLTRVPMDAFQVGKFPEDFESCDSITGMNLEAWRETFPQDDKCGFPESVENGDFVHCEESGRRVLVYSCRHGYELQGREQLTCTQEGWDFQPPLCKDSGRLPRVTWISMSLAALLIGGFAGLTSTVICRWTRTGTKSTLPISETGGGTPELRCGKHQAVGTSPQRAAAQDSEQVGHTMPHVSSCHRSGWTGSGCRSSSAGAPCIFLFTPCFLVRSAPSSGRFYLQANDSEPECEPA

SEQ ID NO: 13699 - protein, 404 aa, Homo Sapiens
  misc_feature (1)..(1): Xaa can be any naturally occurring amino acid
XYEGYDSTANPTVSNVFSTAAFRFGHATIHPLVRRLDASFQEHPDLPGLWLHQAFFSPWTLLRGGYNEWREFCGLPRLETPADLSTAIASRSVADKILDLYKHPDNIDVWLGGLAENFLPRARTGPLFACLIGKQMKALRDGDWFWWENSHVFTDAQRRELEKHSLSRVICDNTGLTRVPMDAFQVGKFPEDFESCDSITGMNLEAWRETFPQDDKCGFPESVENGDFVHCEESGRRVLVYSCRHGYELQGREQLTCTQEGWDFQPPLCKDVNECADGAHPPCHASARCRNTKGGFQCLCADPYELGDDGRTCVDSGRLPRVTWISMSLAALLIGGFAGLTSTVICRWRVLGWKAGILTGCREPSEGKVAGHCRTASCSQNHRTTLFQTQANPKSAGRLFSQHG

SEQ ID NO: 13700 - protein, 363 aa, Homo Sapiens
YEGYDSTANPTVSNVFSTAAFRFGHATIHPLVRRLDASFQEHPDLPGLWLHQAFFSPWTLLRGGYNEWREFCGLPRLETPADLSTAIASRSVADKILDLYKHPDNIDVWLGGLAENFLPRARTGPLFACLIGKQMKALRDGDWFWWENSHVFTDAQRRELEKHSLSRVICDNTGLTRVPMDAFQVGKFPEDFESCDSITGMNLEAWRETFPQDDKCGFPESVENGDFVHCEESGRRVLVYSCRHGYELQGREQLTCTQEGWDFQPPLCKDSGRLPRVTWISMSLAALLIGGFAGLTSTVICRWTRTGTKSTLPISETGGGTPELRCGKHQAVGTSPQRAAAQDSEQESAGMEGRDTHRLPRAL

SEQ ID NO: 13701 - protein, 30 aa, Homo Sapiens
MGLQACLLGLFALILSGKCSYSPEPDQRRT

SEQ ID NO: 13702 - protein, 39 aa, Homo Sapiens
MGLQACLLGLFALILSGKCSYSPEPDQRRTKIPDPRECG

SEQ ID NO: 13703 - protein, 39 aa, Homo Sapiens; identical to SEQ ID NO: 13702

SEQ ID NO: 13704 - protein, 81 aa, Homo Sapiens
MGLQACLLGLFALILSGKCSYSPEPDQRRTLPPGWVSLGRADPEEELSLTFALRQQNVERLSELVQAVSDPSSPQYGAFWD

SEQ ID NO: 13705 - protein, 563 aa, Homo Sapiens
MGLQACLLGLFALILSGKCSYSPEPDQRRTLPPGWVSLGRADPEEELSLTFALRQQNVERLSELVQAVSDPSSPQYGKYLTLENVADLVRPSPLTLHTVQKWLLAAGAQKCHSVITQDFLTCWLSIRQAELLLPGAEFHHYVGGPTETHVVRSPHPYQLPQALAPHVDFVGGLHRFPPTSSLRQRPEPQVTGTVGLHLGVTPSVIRKRYNLTSQDVGSGTSNNSQACAQFLEQYFHDSDLAQFMRLFGGNFAHQASVARVVGQQGRGRAGIEASLDVQYLMSAGANISTWVYSSPGRHEGQEPFLQWLMLLSNESALPHVHTVSYGDDEDSLSSAYIQRVNTELMKAAARGLTLLFASGDSGAGCWSVSGRHQFRPTFPASSPYVTTVGGTSFQEPFLITNEIVDYISGGGFSNVFPRPSYQEEAVTKFLSSSPHLPPSSYFNASGRAYPDVAALSDGYWVVSNRVPIPWVSGTSASTPVFGGILSLINEHRILSGRPPLGFLNPRLYQQHGAGLFDVTRGCHESCLDEEVEGQGFCSGPGWDPVTGWGTPNFPALLKTLLNP

SEQ ID NO: 13706 - protein, 500 aa, Homo Sapiens
MGLQACLLGLFALILSGKCSYSPEPDQRRTLPPGWVSLGRADPEEELSLTFALRQQNVERLSELVQAVSDPSSPQYGKYLTLENVADLVRPSPLTLHTVQKWLLAAGAQKCHSVITQDFLTCWLSIRQAELLLPGAEFHHYVGGPTETHVVRSPHPYQLPQALAPHVDFVGGLHRFPPTSSLRQRPEPQVTGTVGLHLGVTPSVIRKRYNLTSQDVGSGTSNNSQACAQFLEQYFHDSDLAQFMRLFGGNFAHQASVARVVGQQGRGRAGIEASLDVQYLMSAGANISTWVYSSPGDSGAGCWSVSGRHQFRPTFPASSPYVTTVGGTSFQEPFLITNEIVDYISGGGFSNVFPRPSYQEEAVTKFLSSSPHLPPSSYFNASGRAYPDVAALSDGYWVVSNRVPIPWVSGTSASTPVFGGILSLINEHRILSGRPPLGFLNPRLYQQHGAGLFDVTRGCHESCLDEEVEGQGFCSGPGWDPVTGWGTPNFPALLKTLLNP

SEQ ID NO: 13707 - protein, 162 aa, Homo Sapiens
MGLQACLLGLFALILSGKCSYSPEPDQRRTLPPGWVSLGRADPEEELSLTFALRQQNVERLSELVQAVSDPSSPQYGKYLTLENVADLVRPSPLTLHTVQKWLLAAGAQKCHSVITQDFLTCWLSIRQAELLLPGAEFHHYVGGPTETHVWGDCTVFPQHHP

SEQ ID NO: 13708 - protein, 470 aa, Homo Sapiens
MGLQACLLGLFALILSGKCSYSPEPDQRRTLPPGWVSLGRADPEEELSLTFALRQQNVERLSELVQAVSDPSSPQYVGGLHRFPPTSSLRQRPEPQVTGTVGLHLGVTPSVIRKRYNLTSQDVGSGTSNNSQACAQFLEQYFHDSDLAQFMRLFGGNFAHQASVARVVGQQGRGRAGIEASLDVQYLMSAGANISTWVYSSPGRHEGQEPFLQWLMLLSNESALPHVHTVSYGDDEDSLSSAYIQRVNTELMKAAARGLTLLFASGDSGAGCWSVSGRHQFRPTFPASSPYVTTVGGTSFQEPFLITNEIVDYISGGGFSNVFPRPSYQEEAVTKFLSSSPHLPPSSYFNASGRAYPDVAALSDGYWVVSNRVPIPWVSGTSASTPVFGGILSLINEHRILSGRPPLGFLNPRLYQQHGAGLFDVTRGCHESCLDEEVEGQGFCSGPGWDPVTGWGTPNFPALLKTLLNP

SEQ ID NO: 13709 - protein, 40 aa, Homo Sapiens
MGLQAWALCPHPLWQMQLQPGARPAEDAAPRLGVPGPCGP

SEQ ID NO: 13710 - protein, 99 aa, Homo Sapiens
MRLFGGNFAHQASVARVVGQQGRGRAGIEASLDVQYLMSAGANISTWVYSSPGDSGAGCWSVSGRHQFRPTFPASRSQAPNLLCGIQLPLFLFVSSQAF

SEQ ID NO: 13711 - protein, 162 aa, Homo Sapiens
MRLFGGNFAHQASVARVVGQQGRGRAGIEASLDVQYLMSAGANISTWVYSSPGRHEGQEPFLQWLMLLSNESALPHVHTVSYGDDEDSLSSAYIQRVNTELMKAAARGLTLLFASGDSGAGCWSVSGRHQFRPTFPASRSQAPNLLCGIQLPLFLFVSSQAF

SEQ ID NO: 13712 - protein, 320 aa, Homo Sapiens
MRLFGGNFAHQASVARVVGQQGRGRAGIEASLDVQYLMSAGANISTWVYSSPGRHEGQEPFLQWLMLLSNESALPHVHTVSYGDDEDSLSSAYIQRVNTELMKAAARGLTLLFASGDSGAGCWSVSGRHQFRPTFPASSPYVTTVGGTSFQEPFLITNEIVDYISGGGFSNVFPRPSYQEEAVTKFLSSSPHLPPSSYFNASGRAYPDVAALSDGYWVVSNRVPIPWVSGTSASTPVFGGILSLINEHRILSGRPPLGFLNPRLYQQHGAGLFDVTRGCHESCLDEEVEGQGFCSGPGWDPVTGWGTPNFPALLKTLLNP

SEQ ID NO: 13713 - protein, 320 aa, Homo Sapiens; identical to SEQ ID NO: 13712

SEQ ID NO: 13714 - protein, 320 aa, Homo Sapiens; identical to SEQ ID NO: 13712

SEQ ID NO: 13715 - protein, 320 aa, Homo Sapiens; identical to SEQ ID NO: 13712

SEQ ID NO: 13716 - protein, 171 aa, Homo Sapiens
  misc_feature (1)..(1): Xaa can be any naturally occurring amino acid
XAVSDPSSPQYGKYLTLENVADLVRPSPLTLHTVQKWLLAAGAQKCHSVITQDFLTCWLSIRQAELLLPGAEFHHYVGGPTETHVVRSPHPYQLPQALAPHVDFGDSGAGCWSVSGRHQFRPTFPASSPYVTTVGGTSFQEPFLITNEIVDYISGGGFSNVFPRPSYQEEA

SEQ ID NO: 13717 - protein, 400 aa, Homo Sapiens
  misc_feature (1)..(1): Xaa can be any naturally occurring amino acid
XGRADPEEELSLTFALRQQNVERLSELVQAVSDPSSPQYGKYLTLENVADLVRPSPLTLHTVQKWLLAAGAQKCHSVITQDFLTCWLSIRQAELLLPGAEFHHYVGGPTETHVVRSPHPYQLPQALAPHVDFGRHEGQEPFLQWLMLLSNESALPHVHTVSYGDDEDSLSSAYIQRVNTELMKAAARGLTLLFASGDSGAGCWSVSGRHQFRPTFPASSPYVTTVGGTSFQEPFLITNEIVDYISGGGFSNVFPRPSYQEEAVTKFLSSSPHLPPSSYFNASGRAYPDVAALSDGYWVVSNRVPIPWVSGTSASTPVFGGILSLINEHRILSGRPPLGFLNPRLYQQHGAGLFDVTRGCHESCLDEEVEGQGFCSGPGWDPVTGWGTPNFPALLKTLLNP

SEQ ID NO: 13718 - protein, 92 aa, Homo Sapiens
  misc_feature (1)..(1): Xaa can be any naturally occurring amino acid
XLQWLMLLSNESALPHVHTVSYGDDEDSLSSAYIQRVNTELMKAAARGLTLLFASGDSGAGCWSVSGRHQFRPTFPASSGRHILPGTFPHHK

SEQ ID NO: 13719 - protein, 282 aa, Homo Sapiens
MLLLAPQMLNLLLLALPVLASRAYAAPAPGQALQRVGIVGGQEAPRSKWPWQVSLRVHGPYWMHFCGGSLIHPQWVLTAAHCVGPDVKDLAALRVQLREQHLYYQDQLLPVSRIIVHPQFYTAQIGADIALLELEEPVNVSSHVHTVTLPPASETFPPGMPCWVTGWGDVDNDERLPPPFPLKQVKVPIMENHICDAKYHLGAYTGDDVRIVRDDMLCAGNTRRDSCQGDSGGPLVCKVNGTWLQAGVVSWGEGCAQPNRPGIYTRVTYYLDWIHHYVPKKP

SEQ ID NO: 13720 - protein, 275 aa, Homo Sapiens
MLNLLLLALPVLASRAYAAPAPGQALQRVGIVGGQEAPRSKWPWQVSLRVHGPYWMHFCGGSLIHPQWVLTAAHCVGPDVKDLAALRVQLREQHLYYQDQLLPVSRIIVHPQFYTAQIGADIALLELEEPVNVSSHVHTVTLPPASETFPPGMPCWVTGWGDVDNDERLPPPFPLKQVKVPIMENHICDAKYHLGAYTGDDVRIVRDDMLCAGNTRRDSCQGDSGGPLVCKVNGTWLQAGVVSWGEGCAQPNRPGIYTRVTYYLDWIHHYVPKKP

SEQ ID NO: 13721 - protein, 213 aa, Homo Sapiens
YWMHFCGGSLIHPQWVLTAAHCVGPVQLREQHLYYQDQLLPVSRIIVHPQFYTAQIGADIALLELEEPVNVSSHVHTVTLPPASETFPPGMPCWVTGWGDVDNDERLPPPFPLKQVKVPIMENHICDAKYHLGAYTGDDVRIVRDDMLCAGNTRRDSCQGDSGGPLVCKVNGTWLQAGVVSWGEGCAQPNRPGIYTRVTYYLDWIHHYVPKKP

SEQ ID NO: 13722 - protein, 282 aa, Homo Sapiens
MLLLAPQMLNLLLLALPVLASRAYAAPAPGQALQRVGIVGGQEAPRSKWPWQVSLRVRDRYWMHFCGGSLIHPQWVLTAAHCVGPDVKDLAALRVQLREQHLYYQDQLLPVSRIIVHPQFYTAQIGADIALLELEEPVNVSSHVHTVTLPPASETFPPGMPCWVTGWGDVDNDERLPPPFPLKQVKVPIMENHICDAKYHLGAYTGDDVRIVRDDMLCAGNTRRDSCQGDSGGPLVCKVNGTWLQAGVVSWGEGCAQPNRPGIYTRVTYYLDWIHHYVPKKP

SEQ ID NO: 13723 - protein, 275 aa, Homo Sapiens
MLNLLLLALPVLASRAYAAPAPGQALQRVGIVGGQEAPRSKWPWQVSLRVRDRYWMHFCGGSLIHPQWVLTAAHCVGPDVKDLAALRVQLREQHLYYQDQLLPVSRIIVHPQFYTAQIGADIALLELEEPVNVSSHVHTVTLPPASETFPPGMPCWVTGWGDVDNDERLPPPFPLKQVKVPIMENHICDAKYHLGAYTGDDVRIVRDDMLCAGNTRRDSCQGDSGGPLVCKVNGTWLQAGVVSWGEGCAQPNRPGIYTRVTYYLDWIHHYVPKKP

SEQ ID NO: 13724 - protein, 292 aa, Homo Sapiens
MLNLLLLALPVLASRAYAAPAPGQALQRVGIVGGQEAPRSKWPWQVSLRVRDRYWMHFCGGSLIHPQWVLTAAHCVGPDVKDLAALRVQLREQHLYYQDQLLPVSRIIVHPQFYTAQIGADIALLELEEPVNVSSHVHTVTLPPASETFPPGMPCWVTGWGDVDNDERLPPPFPLKQVKVPIMENHICDAKYHLGAYTGDDVRIVRDDMLCAGNTRRDSCQGDSGGPLVCKVNGTWLQAGVVSWGEGCAQPNRPGIYTRVTYYLDWIHHYVPKKPDGVSPCWPVWSRTPDLK

SEQ ID NO: 13725 - protein, 242 aa, Homo Sapiens
MLLLAPQMLSLLLLALPVLASPAYVAPAPGQALQQTGIVGGQEAPRSKWPWQVSLRVRGPYWMHFCGGSLIHPQWVLTAAHCVEPDIKDLAALRVQLREQHLYYQDQLLPVSRIIVHPQFYIIQTGADIALLELEEPVNISSHIHTVTLPPASETFPPGMPCWVTGWGDVDNNVHLPPPYPLKEVEVPVVENHLCNAEYHTGLHTGHSFQIVRDDMLCAGSENHDSCQGDSGGPLVCKVNGT

SEQ ID NO: 13726 - protein, 235 aa, Homo Sapiens
MLSLLLLALPVLASPAYVAPAPGQALQQTGIVGGQEAPRSKWPWQVSLRVRGPYWMHFCGGSLIHPQWVLTAAHCVEPDIKDLAALRVQLREQHLYYQDQLLPVSRIIVHPQFYIIQTGADIALLELEEPVNISSHIHTVTLPPASETFPPGMPCWVTGWGDVDNNVHLPPPYPLKEVEVPVVENHLCNAEYHTGLHTGHSFQIVRDDMLCAGSENHDSCQGDSGGPLVCKVNGT

SEQ ID NO: 13727 - protein, 42 aa, Homo Sapiens
MVGKLKQNLLLACLVISSVTVFYLGQHAMECHHRIEERSQPV

SEQ ID NO: 13728 - protein, 140 aa, Homo Sapiens
MVGKLKQNLLLACLVISSVTVFYLGQHAMECHHRIEERSQPVKLESTRTTVRTGLDLKANKTFAYHKDMPLIFIGGVPRSGTTLMRAMLDAHPDIRCGEETRVIPRILALKQMWSRSSKEKIRLDEAGVTDEVLDSAMQA

SEQ ID NO: 13729 - protein, 370 aa, Homo Sapiens
MVGKLKQNLLLACLVISSVTVFYLGQHAMECHHRIEERSQPVKLESTRTTVRTGLDLKANKTFAYHKDMPLIFIGGVPRSGTTLMRAMLDAHPDIRCGEETRVIPRILALKQMWSRSSKEKIRLDEAGVTDEVLDSAMQAFLLEIIVKHGEPAPYLCNKDPFALKSLTYLSRLFPNAKFLLMVRDGRASVHSMISRKVTIAGFDLNSYRDCLTKWNRAIETMYNQCMEVGYKKCMLVHYEQLVLHPERWMRTLLKFLQIPWNHSVLHHEEMIGKAGGVSLSKVERSTDQVIKPVNVGALSKWVGKIPPDVLQDMAVIAPMLAKLGYDPYANPPNYGKPDPKIIENTRRVYKGEFQLPDFLKEKPQTEQVE

SEQ ID NO: 13730 - protein, 168 aa, Homo Sapiens
DFLGIAWSDAVLHHEDLIGKPGGVSLSKIERSTDQVIKPVNLEALSKWTGHIPGDVVRDMAQIAPMLAQLGYDPYANPPNYGNPDPFVINNTQRVSVHLYLWKCTLGDMGLLQMWKLQPPEEMFSLSIPGHLICSCLMDTVNYMIACISILLGLQGSSKPTGSLSLIL

SEQ ID NO: 13731 - protein, 47 aa, Homo Sapiens
MRLSVRRVLLAAGCALVLVLAVQLGQQVLECRAVLAGLRSPRGAMRP

SEQ ID NO: 13732 - protein, 48 aa, Homo Sapiens
MRLSVRRVLLAAGCALVLVLAVQLGQQVLECRAVLAGLRSPRGAMRPE

SEQ ID NO: 13733 - protein, 64 aa, Homo Sapiens
MRLSVRRVLLAAGCALVLVLAVQLGQQVLECRAVLAGLRSPRGAMRPEQEELVMVGTNHVEYRY

SEQ ID NO: 13734 - protein, 120 aa, Homo Sapiens
MRLSVRRVLLAAGCALVLVLAVQLGQQVLECRAVLAGLRSPRGAMRPEQEELVMVGTNHVEYRYGKAMPLIFVGGVPRSGTTLMRAMLDAHPEVRCGEETRIIPRVLAMRQAWSKSGREK

SEQ ID NO: 13735 - protein, 142 aa, Homo Sapiens
MRLSVRRVLLAAGCALVLVLAVQLGQQVLECRAVLAGLRSPRGAMRPEQEELVMVGTNHVEYRYGKAMPLIFVGGVPRSGTTLMRAMLDAHPEVRCGEETRIIPRVLAMRQAWSKSGREKLRLDEAGVTDEVLDAAMQAFIL

SEQ ID NO: 13736 - protein, 377 aa, Homo Sapiens
MRLSVRRVLLAAGCALVLVLAVQLGQQVLECRAVLAGLRSPRGAMRPEQEELVMVGTNHVEYRYGKAMPLIFVGGVPRSGTTLMRAMLDAHPEVRCGEETRIIPRVLAMRQAWSKSGREKLRLDEAGVTDEVLDAAMQAFILEVIAKHGEPARVLCNKDPFTLKSSVYLSRLFPNSKFLLMVRDGRASVHSMITRKVTIAGFDLSSYRDCLTKWNKAIEVMYAQCMEVGKEKCLPVYYEQLVLHPRRSLKLILDFLGIAWSDAVLHHEDLIGKPGGVSLSKIERSTDQVIKPVNLEALSKWTGHIPGDVVRDMAQIAPMLAQLGYDPYANPPNYGNPDPFVINNTQRVLKGDYKTPANLKGYFQVNQNSTSSHLGSS

SEQ ID NO: 13737 - protein, 377 aa, Homo Sapiens; identical to SEQ ID NO: 13736

SEQ ID NO: 13738 - protein, 377 aa, Homo Sapiens; identical to SEQ ID NO: 13736

SEQ ID NO: 13739 - protein, 333 aa, Homo Sapiens
MSPWSWFLLQTLCLLPTGAASRRGAPGTANCELKPQQSELNSFLWTIKRDPPSYFFGTIHVPYTRVWDFIPDNSKEAFLQSSIVYFELDLTDPYTISALTSCQMLPQGENLQDVLPRDIYCRLKRHLEYVKLMMPLWMTPDQRGKGLYADYLFNAIAGNWERKRPVWVMLMVNSLTEVDIKSRGVPVLDLFLAQEAERLRKQTGAVEKVEEQCHPLNGLNFSQVIFALNQTLLQQESLRAGSLQIPYTTEDLIKHYNCGDLSSVILSHDSSQVPNFINATLPPQERITAQEIDSYLRRELIYKRNERIGKRVKALLEEFPDKGFFFAFGAASQ

SEQ ID NO: 13740 - protein, 505 aa, Homo Sapiens
MSPWSWFLLQTLCLLPTGAASRRGAPGTANCELKPQQSELNSFLWTIKRDPPSYFFGTIHVPYTRVWDFIPDNSKEAFLQSSIVYFELDLTDPYTISALTSCQMLPQGENLQDVLPRDIYCRLKRHLEYVKLMMPLWMTPDQRGKGLYADYLFNAIAGNWERKRPVWVMLMVNSLTEVDIKSRGVPVLDLFLAQEAERLRKQTGAVEKVEEQCHPLNGLNFSQVIFALNQTLLQQESLRAGSLQIPYTTEDLIKHYNCGDLSSVILSHDSSQVPNFINATLPPQERITAQEIDSYLRRELIYKRNERIGKRVKALLEEFPDKGFFFAFGAGHFMGNNTVLDVLRREGYEVEHAPAGRPIHKGKSKKTSTRPTLSTIFAPKVPTLEVPAPEAVSSGHSTLPPLVSRPGSADTPSEAEQRFRKKRRRSQRRPRLRQFSDLWVRLEESDIVPQLQVPVLDRHISTELRLPRRGHSHHSQMVASSACLSLWTPVFWVLVLAFQTETPLL

SEQ ID NO: 13741 - protein, 456 aa, Homo Sapiens
MSPWSWFLLQTLCLLPTGAASRRGAPGTANCELKPQQSELNSFLWTIKRDPPSYFFGTIHVPYTRVWDFIPDNSKEAFLQSSIVYFELDLTDPYTISALTSCQMLPQGENLQDVLPRDIYCRLKRHLEYVKLMMPLWMTPDQRGKGLYADYLFNAIAGNWERKRPVWVMLMVNSLTEVDIKSRGVPVLDLFLAQEAERLRKQTGAVEKVEEQCHPLNGLNFSQVPNFINATLPPQERITAQEIDSYLRRELIYKRNERIGKRVKALLEEFPDKGFFFAFGAGHFMGNNTVLDVLRREGYEVEHAPAGRPIHKGKSKKTSTRPTLSTIFAPKVPTLEVPAPEAVSSGHSTLPPLVSRPGSADTPSEAEQRFRKKRRRSQRRPRLRQFSDLWVRLEESDIVPQLQVPVLDRHISTELRLPRRGHSHHSQMVASSACLSLWTPVFWVLVLAFQTETPLL

SEQ ID NO: 13742 - protein, 517 aa, Homo Sapiens
MHAALAGPLLAALLATARARPQPPDGGQCRPPGSQRDLNSFLWTIRRDPPAYLFGTIHVPYTRVWDFIPDNSKAAFQASTRVYFELDLTDPYTISALASCQLLPHGENLQDVLPHELYWRLKRHLDYVKLMMPSWMTPAQRGKGLYADYLFNAIAGNWERKRPVWVMLMVNSLTERDVRFRGVPVLDLYLAQQAEKMKKTTGAVEQVEEQCHPLNNGLNFSQVLFALNQTLLQQESVRAGSLQASYTTEDLIKHYNCGDLSAVIFNHDTSQLPNFINTTLPPHEQVTAQEIDSYFRQELIYKRNERMGKRVMALLRENEDKICFFAFGAGHFLGNNTVIDILRQAGLEVDHTPAGQAIHSPAPQSPAPSPEGTSTSPAPVTPAAAVPEAPSVTPTAPPEDEDPALSPHLLLPDSLSQLEEFGRQRKWHKRQSTHQRPRQFNDLWVRIEDSTTASPPPLPLQPTHSSGTAKPPFQLSDQLQQQDPPGPASSSAPTLGLLPAIATTIAVCFLLHSLGPS

SEQ ID NO: 13743 - protein, 37 aa, Homo Sapiens
MPGRTWELCLLLLLGLGLGSQEALPPPCERTSPADLH

SEQ ID NO: 13744 - protein, 552 aa, Homo Sapiens
MPGRTWELCLLLLLGLGLGSQEALPPPCESEIYCHGELLNQVQMAKLYQDDKQFVDMPLSIAPEQVLQTFTELSRDHNHSIPREQLQAFVHEHFQAKGQELQPWTPADWKDSPQFLQKISDAKLRAWAGQLHQLWKKLGKKMKPEVLSHPERFSLIYSEHPFIVPGGRFVEFYYCYGHVPNGGRVYYLQRSQPPLLTLMMDCYLTHTNDTAFLQENIETLALELDFWTKNRTVSVSLEGKNYLLNRYYVPYGGPRPESYSKDVELADTLPEGDREALWAELKAGAESGWDFSSRWLIGGPNPNSLSGIRTSKLVPVDLNAFLCQAEELMSNFYSRLGNDSQATKYRILRSQRLAALNTVLWDEQTGAWFDYDLEKKKKNREFYPSNLTPLWAGCFSDPGVADKALKYLEDNRILTYQYGIPTSLQKTGQQWDFPNAWAPLQDLVIRGLAKAPLRRAQEVAFQLAQNWIRTNFDVYSQKSAMYEKYDVSNGGQPGGGGEYEVQEGFGWTNGVVLMLLDRYGDRLTSGAKLAFLEPHCLAATLLPSLLLSLLPW

SEQ ID NO: 13745 - protein, 583 aa, Homo Sapiens
MPGRTWELCLLLLLGLGLGSQEALPPPCESEIYCHGELLNQVQMAKLYQDDKQFVDMPLSIAPEQVLQTFTELSRDHNHSIPREQLQAFVHEHFQAKGQELQPWTPADWKDSPQFLQKISDAKLRAWAGQLHQLWKKLGKKMKPEVLSHPERFSLIYSEHPFIVPGGRFVEFYYWDSYWVMEGLLLSEMAETVKGMLQNFLDLVKTYGHVPNGGRVYYLQRSQPPLLTLMMDCYLTHTNDTAFLQENIETLALELDFWTKNRTVSVSLEGKNYLLNRYYVPYGGPRPESYSKDVELADTLPEGDREALWAELKAGAESGWDFSSRWLIGGPNPNSLSGIRTSKLVPVDLNAFLCQAEELMSNFYSRLGNDSQATKYRILRSQRLAALNTVLWDEQTGAWFDYDLEKKKKNREFYPSNLTPLWAGCFSDPGVADKALKYLEDNRILTYQYGIPTSLQKTGQQWDFPNAWAPLQDLVIRGLAKAPLRRAQEVAFQLAQNWIRTNFDVYSQKSAMYEKYDVSNGGQPGGGGEYEVQEGFGWTNGVVLMLLDRYGDRLTSGAKLAFLEPHCLAATLLPSLLLSLLPW

SEQ ID NO: 13746 - protein, 150 aa, Homo Sapiens
MRKTRLWGLLWMLFVSELRAATKLTEEKYELKEGQTLDVKCDYTLEKFASSQKAWQIIRDGEMPKTLACTERPSKNSHPVQVGRIILEDYHDHGLLRVRMVNLQVEDSGLYQCVIYQPPKEPHMLFDRIRLVVTKGFRCSTLSFSWLVDS

SEQ ID NO: 13747 - protein, 250 aa, Homo Sapiens
MRKTRLWGLLWMLFVSELRAATKLTEEKYELKEGQTLDVKCDYTLEKFASSQKAWQIIRDGEMPKTLACTERPSKNSHPVQVGRIILEDYHDHGLLRVRMVNLQVEDSGLYQCVIYQPPKEPHMLFDRIRLVVTKGFSGTPGSNENSTQNVYKIPPTTTKALCPLYTSPRTVTQAPPKSTADVSTPDSEINLTNVTDIIREKSMTFGIRRLDVESHPLPPLHTGHFRISQFFSQAGTQSLHSCYKGKPTP

SEQ ID NO: 13748 - protein, 234 aa, Homo Sapiens
MRKTRLWGLLWMLFVSELRAATKLTEEKYELKEGQTLDVKCDYTLEKFASSQKAWQIIRDGEMPKTLACTERPSKNSHPVQVGRIILEDYHDHGLLRVRMVNLQVEDSGLYQCVIYQPPKEPHMLFDRIRLVVTKGFSGTPGSNENSTQNVYKIPPTTTKALCPLYTSPRTVTQAPPKSTADVSTPDSEINLTNVTDIIRVPVFNIVILLAGGFLSKSLVFSVLFAVTLRSFVP

SEQ ID NO: 13749 - protein, 225 aa, Homo Sapiens
MRKTRLWGLLWMLFVSELRAATKLTEEKYELKEGQTLDVKCDYTLEKFASSQKAWQIIRDGEMPKTLACTERPSKNSHPVQVGRIILEDYHDHGLLRVRMVNLQVEDSGLYQCVIYQPPKEPHMLFDRIRLVVTKGFSGTPGSNENSTQNVYKIPPTTTKALCPLYTSPRTVTQAPPKSTADVSTPDSEINLTNVTDIIRYSFQVPGPLVWTLSPLFPSLCAERM

SEQ ID NO: 13750 - protein, 219 aa, Homo Sapiens
MEPLRLLILLFVTELSGAHNTTVFQGVAGQSLQVSCPYDSMKHWGRRKAWCRQLGEKGPCQRVVSTHNLWLLSFLRRWNGSTAITDDTLGGTLTITLRNLQPHDAGLYQCQSLHGSEADTLRKVLVEVLADPLDHRDAGDLWFPGESESFEDAHVEHSISRAERHVKEDDGRKSPGEVPPGTSPACILATWPPGLLVLLWQETTLPEHCFSWTLEAGTG

SEQ ID NO: 13751 - protein, 222 aa, Homo Sapiens
MEPLRLLILLFVTELSGAHNTTVFQGVAGQSLQVSCPYDSMKHWGRRKAWCRQLGEKGPCQRVVSTHNLWLLSFLRRWNGSTAITDDTLGGTLTITLRNLQPHDAGLYQCQSLHGSEADTLRKVLVEVLADPLDHRDAGDLWFPGESESFEDAHVEHSISRPSQGSHLPSCLSKEPLGRRNPLPTHFHPSPPGLHLSHQDSSSQRPLGCSLAWTEARDTSTQ

SEQ ID NO: 13752 - protein, 230 aa, Homo Sapiens
MEPLRLLILLFVTELSGAHNTTVFQGVAGQSLQVSCPYDSMKHWGRRKAWCRQLGEKGPCQRVVSTHNLWLLSFLRRWNGSTAITDDTLGGTLTITLRNLQPHDAGLYQCQSLHGSEADTLRKVLVEVLADPLDHRDAGDLWFPGESESFEDAHVEHSISRSLLEGEIPFPPTSILLLLACIFLIKILAASALWAAAWHGQKPGTHPPSELDCGHDPGYQLQTLPGLRDT

SEQ ID NO: 13753 - protein, 238 aa, Homo Sapiens
MPGPWLLLALALTLNLTGVPGGRAQPEAAQQEAVTAAEHPGLDDFLRQVERLLFLRENIQRLQGDQASQIFQSDWLSKRQHPGKREEEEEEGVEEEEEEEGGAVGPHKRQHPGRREDEASWSVDVTQHKRQHPGRRSPWLAYAVPKRQHPGRRLADPKAQRSWEEEEEEEEREEDLMPEKRQHPGKRALGGPCGPQGAYGQAGLLLGLLDDLSRSQGAEEKRQHPGRRAAWVREPLEE

SEQ ID NO: 13754 - protein, 242 aa, Homo Sapiens
MPGPWLLLALALTLNLTGVPGGRAQPEAAQQEAVTAAEHPGLDDFLRQVERLLFLRENIQRLQGDQGEHSASQIFQSDWLSKRQHPGKREEEEEEGVEEEEEEEGGAVGPHKRQHPGRREDEASWSVDVTQHKRQHPGRRSPWLAYAVPKRQHPGRRLADPKAQRSWEEEEEEEEREEDLMPEKRQHPGKRALGGPCGPQGAYGQAGLLLGLLDDLSRSQGAEEKRQHPGRRAAWVREPLEE

SEQ ID NO: 13755 - protein, 1050 aa, Homo Sapiens
MEVAVEKAVAAAAAASAAASGGPSAAPSGENEAESRQGPDSERGGEAARLNLLDTCAVCHQNIQSRAPKLLPCLHSFCQRCLPAPQRYLMLPAPMLGSAETPPPVPAPGSPVSGSSPFATQVGVIRCPVCSQECAERHIIDNFFVKDTTEVPSSTVEKSNQVCTSCEDNAEANGFCVECVEWLCKTCIRAHQRVKFTKDHTVRQKEEVSPEAVGVTSQRPVFCPFHKKEQLKLYCETCDKLTCRDCQLLEHKEHRYQFIEEAFQNQKVIIDTLITKLMEKTKYIKFTGNQIQNRIIEVNQNQKQVEQDIKVAIFTLMVEINKKGKALLHQLESLAKDHRMKLMQQQQEVAGLSKQLEHVMHFSKWAVSSGSSTALLYSKRLITYRLRHLLRARCDASPVTNNTIQFHCDPSFWAQNIINLGSLVIEDKESQPQMPKQNPVVEQNSQPPSGLSSNQLSKFPTQISLAQLRLQHMQQQVMAQRQQVQRRPAPVGLPNPRMQGPIQQPSISHQQPPPRLINFQNHSPKPNGPVLPPHPQQLRYPPNQNIPRQAIKPNPLQMAFLAQQAIKQWQISSGQGTPSTTNSTSSTPSSPTITSAAGYDGKAFGSPMIDLSSPVGGSYNLPSLPDIDCSSTIMLDNIVRKDTNIDHGQPRPPSNRTVQSPNSSVPSPGLAGPVTMTSVHPPIRSPSASSVGSRGSSGSSSKPAGADSTHKVPVVMLEPIRIKQENSGPPENYDFPVVIVKQESDEESRPQNANYPRSILTSLLLNSSQSSTSEETVLRSDAPDSTGDQPGLHQDNSSNGKSEWLDPSQKSPLHVGETRKEDDPNEDWCAVCQNGGELLCCEKCPKVFHLSCHVPTLTNFPSGEWICTFCRDLSKPEVEYDCDAPSHNSEKKKTEGLVKLTPIDKRKCERLLLFLYCHEMSLAFQDPVPLTVPDYYKIIKNPMDLSTIKKRLQEDYSMYSKPEDFVADFRLIFQNCAEFNEPDSEVANAGIKLENYFEELLKNLYPEKRFPKPEFRNESEDNKFSDDSDDDFVQPRKKRLKSIEERQLLK

SEQ ID NO: 13756 - protein, 1016 aa, Homo Sapiens
MEVAVEKAVAAAAAASAAASGGPSAAPSGENEAESRQGPDSERGGEAARLNLLDTCAVCHQNIQSRAPKLLPCLHSFCQRCLPAPQRYLMLPAPMLGSAETPPPVPAPGSPVSGSSPFATQVGVIRCPVCSQECAERHIIDNFFVKDTTEVPSSTVEKSNQVCTSCEDNAEANGFCVECVEWLCKTCIRAHQRVKFTKDHTVRQKEEVSPEAVGVTSQRPVFCPFHKKEQLKLYCETCDKLTCRDCQLLEHKEHRYQFIEEAFQNQKVIIDTLITKLMEKTKYIKFTGNQIQNRIIEVNQNQKQVEQDIKVAIFTLMVEINKKGKALLHQLESLAKDHRMKLMQQQQEVAGLSKQLEHVMHFSKWAVSSGSSTALLYSKRLITYRLRHLLRARCDASPVTNNTIQFHCDPSFWAQNIINLGSLVIEDKESQPQMPKQNPVVEQNSQPPSGLSSNQLSKFPTQISLAQLRLQHMQQQQPPPRLINFQNHSPKPNGPVLPPHPQQLRYPPNQNIPRQAIKPNPLQMAFLAQQAIKQWQISSGQGTPSTTNSTSSTPSSPTITSAAGYDGKAFGSPMIDLSSPVGGSYNLPSLPDIDCSSTIMLDNIVRKDTNIDHGQPRPPSNRTVQSPNSSVPSPGLAGPVTMTSVHPPIRSPSASSVGSRGSSGSSSKPAGADSTHKVPVVMLEPIRIKQENSGPPENYDFPVVIVKQESDEESRPQNANYPRSILTSLLLNSSQSSTSEETVLRSDAPDSTGDQPGLHQDNSSNGKSEWLDPSQKSPLHVGETRKEDDPNEDWCAVCQNGGELLCCEKCPKVFHLSCHVPTLTNFPSGEWICTFCRDLSKPEVEYDCDAPSHNSEKKKTEGLVKLTPIDKRKCERLLLFLYCHEMSLAFQDPVPLTVPDYYKIIKNPMDLSTIKKRLQEDYSMYSKPEDFVADFRLIFQNCAEFNEPDSEVANAGIKLENYFEELLKNLYPEKRFPKPEFRNESEDNKFSDDSDDDFVQPRKKRLKSIEERQLLK

SEQ ID NO: 13757 - protein, 460 aa, Homo Sapiens
IYFQLHRALKMIVDPVEPHGEMKFQWDLNAWTKSAEAFGKIVAERPGTNSTGPAPMAPPRAPGPLSKQGSGSSQPMEVQEGYGFGSEPHVSGVKRSRSGEGEVSGLMRKVPRVSLERLDLDLTADSQPPVFKVFPGSTTEDYNLIVIERGAAAAATGQPGTAPAGTPGAPPLAGMAIVKEEETEAAIGAPPTATEGPETKPVLMALAEGPGAEGPRLASPSGSTSSGLEVVAPEGTSAPGGGPGTLDDSATICRVCQKPGDLVMCNQCEFCFHLDCHLPALQDVPGEEWSCSLCHVLPDLKEEDGSLSLDGADSTGVVAKLSPANQRKCERVLLALFCHEPCRPLHQLATDSTFSLDQPGGTLDLTLIRARLQEKLSPPYSSPQEFAQDVGRMFKQFNKLTEDKADVQSIIGLQRFFETRMNEAFGDTKFSAVLVEPPPMSLPGAGLSSQELSGGPGDGP

SEQ ID NO: 13758 - protein, 753 aa, Homo Sapiens
MAASAAAASAAAASAASGSPGPGEGSAGGEKRSTAPSAAASASASAAASSPAGGGAEALELLEHCGVCRERLRPEREPRLLPCLHSACSACLGPAAPAAANSSGDGGAAGDGTGPAKSRDGERTVYCNVHKHEPLVLFCESCDTLTCRDCQLNAHKDHQYQFLEDAVRNQRKLLASLVKRLGDKHATLQKSTKEVRSSIRQVSDVQKRVQVDVKMAILQIMKELNKRGRVLVNDAQKVTEGQQERLERQHWTMTKIQKHQEHILRFASWALESDNNTALLLSKKLIYFQLHRALKMIVDPVEPHGEMKFQWDLNAWTKSAEAFGKIVAERPGTNSTGPAPMAPPRAPGPLSKQGSGSSQPMEVQEGYGFGSGDDPYSSAEPHVSGVKRSRSGEGEVSGLMRKVPRVSLERLDLDLTADSQPPVFKVFPGSTTEDYNLIVIERGAAAAATGQPGTAPAGTPGAPPLAGMAIVKEEETEAAIGAPPTATEGPETKPVLMALAEGPGAEGPRLASPSGSTSSGLEVVAPEGTSAPGGGPGTLDDSATICRVCQKPGDLVMCNQCEFCFHLDCHLPALQDVPGEEWSCSLCHVLPDLKEEDGSLSLDGADSTGVVAKLSPANQRKCERVLLALFCHEPCRPLHQLATDSTFSLDQPGGTLDLTLIRARLQEKLSPPYSSPQEFAQDVGRMFKQFNKLTEDKADVQSIIGLQRFFETRMNEAFGDTKFSAVLVEPPPMSLPGAGLSSQELSGGPGDGP

SEQ ID NO: 13759 - protein, 835 aa, Homo Sapiens
MAASAAAASAAAASAASGSPGPGEGSAGGEKRSTAPSAAASASASAAASSPAGGGAEALELLEHCGVCRERLRPEREPRLLPCLHSACSACLGPAAPAAANSSGDGGAAGDGTVVDCPVCKQQCFSKDIVENYFMRDSGSKAATDAQDANQCCTSCEDNAPATSYCVECSEPLCETCVEAHQRVKYTKDHTVRSTGPAKSRDGERTVYCNVHKHEPLVLFCESCDTLTCRDCQLNAHKDHQYQFLEDAVRNQRKLLASLVKRLGDKHATLQKSTKEVRSSIRQVSDVQKRVQVDVKMAILQIMKELNKRGRVLVNDAQKVTEGQQERLERQHWTMTKIQKHQEHILRFASWALESDNNTALLLSKKLIYFQLHRALKMIVDPVEPHGEMKFQWDLNAWTKSAEAFGKIVAERPGTNSTGPAPMAPPRAPGPLSKQGSGSSQPMEVQEGYGFGSGDDPYSSAEPHVSGVKRSRSGEGEVSGLMRKVPRVSLERLDLDLTADSQPPVFKVFPGSTTEDYNLIVIERGAAAAATGQPGTAPAGTPGAPPLAGMAIVKEEETEAAIGAPPTATEGPETKPVLMALAEGPGAEGPRLASPSGSTSSGLEVVAPEGTSAPGGGPGTLDDSATICRVCQKPGDLVMCNQCEFCFHLDCHLPALQDVPGEEWSCSLCHVLPDLKEEDGSLSLDGADSTGVVAKLSPANQRKCERVLLALFCHEPCRPLHQLATDSTFSLDQPGGTLDLTLIRARLQEKLSPPYSSPQEFAQDVGRMFKQFNKLTEDKADVQSIIGLQRFFETRMNEAFGDTKFSAVLVEPPPMSLPGAGLSSQELSGGPGDGP

SEQ ID NO: 13760 - protein, 61 aa, Homo Sapiens
MRDSGSKAATDAQDANQCCTSCEDNAPATSYCVECSEPLCETCVEAHQRVKYTKDHTVRST

SEQ ID NO: 13761 - protein, 178 aa, Homo Sapiens
MRDSGSKAATDAQDANQCCTSCEDNAPATSYCVECSEPLCETCVEAHQRVKYTKDHTVRSTGPAKSRDGERTVYCNVHKHEPLVLFCESCDTLTCRDCQLNAHKDHQYQFLEDAVRNQRKLLASLVKRLGDKHATLQKSTKEVRSSIRQVSDVQKRVQVDVKMAILQIMKELNKRGRV

SEQ ID NO: 13762 - protein, 162 aa, Homo Sapiens
MRLGAQRPASVWSGGGAERGITLYKVVDCPVCKQQCFSKDIVENYFMRDSGSKAATDAQDANQCCTSCEDNAPATSYCVECSEPLCETCVEAHQRVKYTKDHTVRSTGPAKSRDGERTVYCNVHKHEPLVLFCESCDTLTCRDCQLNAHKDHQYQFLEDAVR

SEQ ID NO: 13763 - protein, 2546 aa, Homo Sapiens
IKAPIEDLDLEGQKLLQRIQSSESFPKKNSGSGNADLQNLLPKVSTMLDRLHSTRQHLHQMWHVRKLKLDQCFQLRLFEQDAEKMFDWITHNKGLFLNSYTEIGTSHPHAMELQTQHNHFAMNCMNVYVNINRIMSVANRLVESGHYASQQIRQIASQLEQEWKAFAAALDERSTLLDMSSIFHQKAEKYMSNVDSWCKACGEVDLPSELQDLEDAIHHHQGIYEHITLAYSEVSQDGKSLLDKLQRPLTPGSSDSLTASANYSKAVHHVLDVIHEVLHHQRQLENIWQHRKVRLHQRLQLCVFQQDVQQVLDWIENHGEAFLSKHTGVGKSLHRARALQKRHEDFEEVAQNTYTNADKLLEAAEQLAQTGECDPEEIYQAAHQLEDRIQDFVRRVEQRKILLDMSVSFHTHVKELWTWLEELQKELLDDVYAESVEAVQDLIKRFGQQQQTTLQVTVNVIKEGEDLIQQLRDSAISSNKTPHNSSINHIETVLQQLDEAQSQMEELFQERKIKLELFLQLRIFERDAIDIISDLESWNDELSQQMNDFDTEDLTIAEQRLQHHADKALTMNNLTFDVIHQGQDLLQYVNEVQASGVELLCDRDVDMATRVQDLLEFLHEKQQELDLAAEQHRKHLEQCVQLRHLQAEVKQVLGWIRNGESMLNAGLITASSLQEAEQLQREHEQFQHAIEKTHQSALQVQQKAEAMLQANHYDMDMIRDCAEKVASHWQQLMLKMEDRLKLVNASVAFYKTSEQVCSVLESLEQEYKREEDWCGGADKLGPNSETDHVTPMISKHLEQKEAFLKACTLARRNADVFLKYLHRNSVNMPGMVTHIKAPEQQVKNILNELFQRENRVLHYWTMRKRRLDQCQQYVVFERSAKQALEWIHDNGEFYLSTHTSTGSSIQHTQELLKEHEEFQITAKQTKERVKLLIQLADGFCEKGHAHAAEIKKCVTAVDKRYRDFSLRMEKYRTSLEKALGISSDSNKSSKSLQLDIIPASIPGSEVKLRDAAHELNEEKRKSARRKEFIMAELIQTEKAYVRDLRECMDTYLWEMTSGVEEIPPGIVNKELIIFGNMQEIYEFHNNIFLKELEKYEQLPEDVGHCFVTWADKFQMYVTYCKNKPDSTQLILEHAGSYFDEIQQRHGLANSISSYLIKPVQRITKYQLLLKELLTCCEEGKGEIKDGLEVMLSVPKRANDAMHLSMLEGFDENIESQGELILQESFQVWDPKTLIRKGRERHLFLFEMSLVFSKEVKDSSGRSKYLYKSKLFTSELGVTEHVEGDPCKFALWVGRTPTSDNKIVLKASSIENKQDWIKHIREVIQERTIHLKGALKEPIHIPKTAPATRQKGRRDGEDLDSQGDGSSQPDTISIASRTSQNTLDSDKLSGGCELTVVIHDFTACNSNELTIRRGQTVEVLERPHDKPDWCLVRTTDRSPAAEGLVPCGSLCIAHSRSSMEMEGIFNHKDSLSVSSNDASPPASVASLQPHMIGAQSSPGPKRPGNTLRKWLTSPVRRLSSGKADGHVKKLAHKHKKSREVRKSADAGSQKDSDDSAATPQDETVEERGRNEGLSSGTLSKSSSSGMQSCGEEEGEEGADAVPLPPPMAIQQHSLLQPDSQDDKASSRLLVRPTSSETPSAAELVSAIEELVKSKMALEDRPSSLLVDQGDSSSPSFNPSDNSLLSSSSPIDEMEERKSSSLKRRHYVLQELVETERDYVRDLGYVVEGYMALMKEDGVPDDMKGKDKIVFGNIHQIYDWHRDFFLGELEKCLEDPEKLGSLFVKHERRLHMYIAYCQNKPKSEHIVSEYIDTFFEDLKQRLGHRLQLTDLLIKPVQRIMKYQLLLKDFLKYSKKASLDTSELERAVEVMCIVPRRCNDMMNVGRLQGFDGKIVAQGKLLLQDTFLVTDQDAGLLPRCRERRIFLFEQIVIFSEPLDKKKGFSMPGFLFKNSIKVSCLCLEENVENDPCKFALTSRTGDVVETFILHSSSPSVRQTWIHEINQILENQRNFLNALTSPIEYQRNHSGGGGGGGSGGSGGGGGSGGGGAPSGGSGHSGGPSSCGGAPSTSRSRPSRIPQPVRHHPPVLVSSAASSQAEADKMSGTSTPGPSLPPPGAAPEAGPSAPSRRPPGADAEGSEREAEPIPKMKVLESPRKGAANASGSSPDAPAKDARASLGTLPLGKPRAGAASPLNSPLSSAVPSLGKEPFPPSSPLQKGGSFWSSIPASPASRPGSFTFPGDSDSLQRQTPRHAAPGKDTDRMSTCSSASEQSVQSTQSNGSESSSSSNISTMLVTHDYTAVKEDEINVYQGEVVQILASNQQNMFLVFRAATDQCPAAEGWIPGFVLGHTSAVIVENPDGTLKKSTSWHTALRLRKKSEKKDKDGKREGKLENGYRKSREGLSNKVSVKLLNPNYIYDVPPEFVIPLSEVTCETGETVVLRCRVCGRPKASITWKGPEHNTLNNDGHYSISYSDLGEATLKIVGVTTEDDGIYTCIAVNDMGSASSSASLRVLGPGMDGIMVTWKDNFDSFYSEVAELGRANWNNWSPY

SEQ ID NO: 13764 - protein, 1508 aa, Homo Sapiens
MAEGFRKNDEMKAMDVLPILKEKVAYLSGGRDKRGGPILTFPARSNHDRIRQEDLRRLISYLACIPSEEVCKRGFTVIVDMRGSKWDSIKPLLKILQESFPCCIHVALIIKPDNFWQKQRTNFGSSKFEFETNMVSLEGLTKVVDPSQLTPEFDGCLEYNHEEWIEIRVAFEDYISNATHMLSRLEELQDILAKKELPQDLEGARNMIEEHSQLKKKVIKAPIEDLDLEGQKLLQRIQSSESFPKKNSGSGNADLQNLLPKVSTMLDRLHSTRQHLHQMWHVRKLKLDQCFQLRLFEQDAEKMFDWITHNKGLFLNSYTEIGTSHPHAMELQTQHNHFAMNCMNVYVNINRIMSVANRLVESGHYASQQIRQIASQLEQEWKAFAAALDERSTLLDMSSIFHQKAEKYMSNVDSWCKACGEVDLPSELQDLEDAIHHHQGIYEHITLAYSEVSQDGKSLLDKLQRPLTPGSSDSLTASANYSKAVHHVLDVIHEVLHHQRQLENIWQHRKVRLHQRLQLCVFQQDVQQVLDWIENHGEAFLSKHTGVGKSLHRARALQKRHEDFEEVAQNTYTNADKLLEAAEQLAQTGECDPEEIYQAAHQLEDRIQDFVRRVEQRKILLDMSVSFHTHVKELWTWLEELQKELLDDVYAESVEAVQDLIKRFGQQQQTTLQVTVNVIKEGEDLIQQLRDSAISSNKTPHNSSINHIETVLQQLDEAQSQMEELFQERKIKLELFLQLRIFERDAIDIISDLESWNDELSQQMNDFDTEDLTIAEQRLQHHADKALTMNNLTFDVIHQGQDLLQYVNEVQASGVELLCDRDVDMATRVQDLLEFLHEKQQELDLAAEQHRKHLEQCVQLRHLQAEVKQVLGWIRNGESMLNAGLITASSLQEAEQLQREHEQFQHAIEKTHQSALQVQQKAEAMLQANHYDMDMIRDCAEKVASHWQQLMLKMEDRLKLVNASVAFYKTSEQVCSVLESLEQEYKREEDWCGGADKLGPNSETDHVTPMISKHLEQKEAFLKACTLARRNADVFLKYLHRNSVNMPGMVTHIKAPEQQVKNILNELFQRENRVLHYWTMRKRRLDQCQQYVVFERSAKQALEWIHDNGEFYLSTHTSTGSSIQHTQELLKEHEEFQITAKQTKERVKLLIQLADGFCEKGHAHAAEIKKCVTAVDKRYRDFSLRMEKYRTSLEKALGISSDSNKSSKSLQLDIIPASIPGSEVKLRDAAHELNEEKRKSARRKEFIMAELIQTEKAYVRDLRECMDTYLWEMTSGVEEIPPGIVNKELIIFGNMQEIYEFHNNIFLKELEKYEQLPEDVGHCFVTWADKFQMYVTYCKNKPDSTQLILEHAGSYFDEIQQRHGLANSISSYLIKPVQRITKYQLLLKELLTCCEEGKGEIKDGLEVMLSVPKRANDAMHLSMLEGFDENIESQGELILQESFQVWDPKTLIRKGRERHLFLFEMSLVFSKEVKDSSGRSKYLYKSKLFVSIGVQNCKSKGNTIAVFL

SEQ ID NO: 13765 - protein, 255 aa, Homo Sapiens
MALEDRPSSLLVDQGDSSSPSFNPSDNSLLSSSSPIDEMEERKSSSLKRRHYVLQELVETERDYVRDLGYVVEGYMALMKEDGVPDDMKGKDKIVFGNIHQIYDWHRDFFLGELEKCLEDPEKLGSLFVKHERRLHMYIAYCQNKPKSEHIVSEYIDTFFEDLKQRLGHRLQLTDLLIKPVQRIMKYQLLLKDFLKYSKKASLDTSELERAVEVMCIVPRRCNDMMNVGRLQGFDGRVVALCHRFKETFREICWF

SEQ ID NO: 13766 - protein, 2309 aa, Homo Sapiens
MKAMDVLPILKEKVAYLSGGRDKRGGPILTFPARSNHDRIRQEDLRRLISYLACIPSEEVCKRGFTVIVDMRGSKWDSIKPLLKILQESFPCCIHVALIIKPDNFWQKQRTNFGSSKFEFETNMVSLEGLTKVVDPSQLTPEFDGCLEYNHEEWIEIRVAFEDYISNATHMLSRLEELQDILAKKELPQDLEGARNMIEEHSQLKKKVIKAPIEDLDLEGQKLLQRIQSSESFPKKNSGSGNADLQNLLPKVSTMLDRLHSTRQHLHQMWHVRKLKLDQCFQLRLFEQDAEKMFDWITHNKGLFLNSYTEIGTSHPHAMELQTQHNHFAMNCMNVYVNINRIMSVANRLVESGHYASQQIRQIASQLEQEWKAFAAALDERSTLLDMSSIFHQKAEKYMSNVDSWCKACGEVDLPSELQDLEDAIHHHQGIYEHITLAYSEVSQDGKSLLDKLQRPLTPGSSDSLTASANYSKAVHHVLDVIHEVLHHQRQLENIWQHRKVRLHQRLQLCVFQQDVQQVLDWIENHGEAFLSKHTGVGKSLHRARALQKRHEDFEEVAQNTYTNADKLLEAAEQLAQTGECDPEEIYQAAHQLEDRIQDFVRRVEQRKILLDMSVSFHTHVKELWTWLEELQKELLDDVYAESVEAVQDLIKRFGQQQQTTLQVTVNVIKEGEDLIQQLRDSAISSNKTPHNSSINHIETVLQQLDEAQSQMEELFQERKIKLELFLQLRIFERDAIDIISDLESWNDELSQQMNDFDTEDLTIAEQRLQHHADKALTMNNLTFDVIHQGQDLLQYVNEVQASGVELLCDRDVDMATRVQDLLEFLHEKQQELDLAAEQHRKHLEQCVQLRHLQAEVKQVLGWIRNGESMLNAGLITASSLQEAEQLQREHEQFQHAIEKTHQSALQVQQKAEAMLQANHYDMDMIRDCAEKVASHWQQLMLKMEDRLKLVNASVAFYKTSEQVCSVLESLEQEYKREEDWCGGADKLGPNSETDHVTPMISKHLEQKEAFLKACTLARRNADVFLKYLHRNSVNMPGMVTHIKAPEQQVKNILNELFQRENRVLHYWTMRKRRLDQCQQYVVFERSAKQALEWIHDNGEFYLSTHTSTGSSIQHTQELLKEHEEFQITAKQTKERVKLLIQLADGFCEKGHAHAAEIKKCVTAVDKRYRDFSLRMEKYRTSLEKALGISSDSNKSSKSLQLDIIPASIPGSEVKLRDAAHELNEEKRKSARRKEFIMAELIQTEKAYVRDLRECMDTYLWEMTSGVEEIPPGIVNKELIIFGNMQEIYEFHNNIFLKELEKYEQLPEDVGHCFVTWADKFQMYVTYCKNKPDSTQLILEHAGSYFDEIQQRHGLANSISSYLIKPVQRITKYQLLLKELLTCCEEGKGEIKDGLEVMLSVPKRANDAMHLSMLEGFDENIESQGELILQESFQVWDPKTLIRKGRERHLFLFEMSLVFSKEVKDSSGRSKYLYKSKLFTSELGVTEHVEGDPCKFALWVGRTPTSDNKIVLKASSIENKQDWIKHIREVIQERTIHLKGALKEPIHIPKTAPATRQKGRRDGEDLDSQGDGSSQPDTISIASRTSQNTLDSDKLSGGCELTVVIHDFTACNSNELTIRRGQTVEVLERPHDKPDWCLVRTTDRSPAAEGLVPCGSLCIAHSRSSMEMEGIFNHKDSLSVSSNDASPPASVASLQPHMIGAQSSPGPKRPGNTLRKWLTSPVRRLSSGKADGHVKKLAHKHKKSREVRKSADAGSQKDSDDSAATPQDETVEERGRNEGLSSGTLSKSSSSGMQSCGEEEGEEGADAVPLPPPMAIQQHSLLQPDSQDDKASSRLLVRPTSSETPSAAELVSAIEELVKSKMALEDRPSSLLVDQGDSSSPSFNPSDNSLLSSSSPIDEMEERKSSSLKRRHYVLQELVETERDYVRDLGYVVEGYMALMKEDGVPDDMKGKDKIVFGNIHQIYDWHRDFFLGELEKCLEDPEKLGSLFVKHERRLHMYIAYCQNKPKSEHIVSEYIDTFFEDLKQRLGHRLQLTDLLIKPVQRIMKYQLLLKDFLKYSKKASLDTSELERAVEVMCIVPRRCNDMMNVGRLQGFDGKIVAQGKLLLQDTFLVTDQDAGLLPRCRERRIFLFEQIVIFSEPLDKKKGFSMPGFLFKNSIKVSCLCLEENVENDPCKFALTSRTGDVVETFILHSSSPSVRQTWIHEINQILENQRNFLNALTSPIEYQRNHSGGGGGGGSGGSGGGGGSGGGGAPSGGSGHSGGPSSCGGAPSTSRSRPSRIPQPVRHHPPVLVSSAASSQAEADKMSE

SEQ ID NO: 13767 - protein, 596 aa, Homo Sapiens
MLPSQAQGLLWWVFPLFPASSLSYPPVSYRADGLARNTFLKACSESSSSSNISTMLVTHDYTAVKEDEINVYQGEVVQILASNQQNMFLVFRAATDQCPAAEGWIPGFVLGHTSAVIVENPDGTLKKSTSWHTALRLRKKSEKKDKDGKREGKLENGYRKSREGLSNKVSVKLLNPNYIYDVPPEFVIPLSEVTCETGETVVLRCRVCGRPKASITWKGPEHNTLNNDGHYSISYSDLGEATLKIVGVTTEDDGIYTCIAVNDMGSASSSASLRVLGPGMDGIMVTWKDNFDSFYSEVAELGRGRFSVVKKCDQKGTKRAVATKFVNKKLMKRDQVTHELGILQSLQHPLLVGLLDTFETPTSYILVLEMADQGRLLDCVVRWGSLTEGKIRAHLGEVLEAVRYLHNCRIAHLDLKPENILVDESLAKPTIKLADFGDAVQLNTTYYIHQLLGNPEFAAPEIILGNPVSLTSDTWSVGVLTYVLLSGVSPFLDDSVEETCLNICRLDFSFPDDYFKGVSQKAKEFVCFLLQEDPAKRPSAALALQEQWLQAGNGRSTGVLDTSRLTSFIERRKHQNDVRPIRSIKNFLQSRLLPRV

SEQ ID NO: 13768 - protein, 458 aa, Homo Sapiens
MPNGLKPVDTLDSLSSVSSAYCSGGQPGTCKYWILDLDSLSVSSNDASPPASVASLQPHMIGAQSSPGPKRPGNTLRKWLTSPVRRLSSGKADGHVKKLAHKHKKSREVRKSADAGSQKDSDDSAATPQDETVEERGRNEGLSSGTLSKSSSSGMQSCGEEEGEEGADAVPLPPPMAIQQHSLLQPDSQDDKASSRLLVRPTSSETPSAAELVSAIEELVKSKMALEDRPSSLLVDQGDSSSPSFNPSDNSLLSSSSPIDEMEERKSSSLKRRHYVLQELVETERDYVRDLGYVVEGYMALMKEDGVPDDMKGKDKIVFGNIHQIYDWHRDFFLGELEKCLEDPEKLGSLFVKHERRLHMYIAYCQNKPKSEHIVSEYIDTFFEDLKQRLGHRLQLTDLLIKPVQRIMKYQLLLKDFLKYSKKASLDTSELERAVEVMCIVPRRCNDMMNVGRLQGFD

SEQ ID NO: 13769 - protein, 3097 aa, Homo Sapiens
MSGSSGGAAAPAASSGPAAAASAAGSGCGGGAGEGAEEAAKDLADIAAFFRSGFRKNDEMKAMDVLPILKEKVAYLSGGRDKRGGPILTFPARSNHDRIRQEDLRRLISYLACIPSEEVCKRGFTVIVDMRGSKWDSIKPLLKILQESFPCCIHVALIIKPDNFWQKQRTNFGSSKFEFETNMVSLEGLTKVVDPSQLTPEFDGCLEYNHEEWIEIRVAFEDYISNATHMLSRLEELQDILAKKELPQDLEGARNMIEEHSQLKKKVIKAPIEDLDLEGQKLLQRIQSSESFPKKNSGSGNADLQNLLPKVSTMLDRLHSTRQHLHQMWHVRKLKLDQCFQLRLFEQDAEKMFDWITHNKGLFLNSYTEIGTSHPHAMELQTQHNHFAMNCMNVYVNINRIMSVANRLVESGHYASQQIRQIASQLEQEWKAFAAALDERSTLLDMSSIFHQKAEKYMSNVDSWCKACGEVDLPSELQDLEDAIHHHQGIYEHITLAYSEVSQDGKSLLDKLQRPLTPGSSDSLTASANYSKAVHHVLDVIHEVLHHQRQLENIWQHRKVRLHQRLQLCVFQQDVQQVLDWIENHGEAFLSKHTGVGKSLHRARALQKRHEDFEEVAQNTYTNADKLLEAAEQLAQTGECDPEEIYQAAHQLEDRIQDFVRRVEQRKILLDMSVSFHTHVKELWTWLEELQKELLDDVYAESVEAVQDLIKRFGQQQQTTLQVTVNVIKEGEDLIQQLRDSAISSNKTPHNSSINHIETVLQQLDEAQSQMEELFQERKIKLELFLQLRIFERDAIDIISDLESWNDELSQQMNDFDTEDLTIAEQRLQHHADKALTMNNLTFDVIHQGQDLLQYVNEVQASGVELLCDRDVDMATRVQDLLEFLHEKQQELDLAAEQHRKHLEQCVQLRHLQAEVKQVLGWIRNGESMLNAGLITASSLQEAEQLQREHEQFQHAIEKTHQSALQVQQKAEAMLQANHYDMDMIRDCAEKVASHWQQLMLKMEDRLKLVNASVAFYKTSEQVCSVLESLEQEYKREEDWCGGADKLGPNSETDHVTPMISKHLEQKEAFLKACTLARRNADVFLKYLHRNSVNMPGMVTHIKAPEQQVKNILNELFQRENRVLHYWTMRKRRLDQCQQYVVFERSAKQALEWIHDNGEFYLSTHTSTGSSIQHTQELLKEHEEFQITAKQTKERVKLLIQLADGFCEKGHAHAAEIKKCVTAVDKRYRDFSLRMEKYRTSLEKALGISSDSNKSSKSLQLDIIPASIPGSEVKLRDAAHELNEEKRKSARRKEFIMAELIQTEKAYVRDLRECMDTYLWEMTSGVEEIPPGIVNKELIIFGNMQEIYEFHNNIFLKELEKYEQLPEDVGHCFVTWADKFQMYVTYCKNKPDSTQLILEHAGSYFDEIQQRHGLANSISSYLIKPVQRITKYQLLLKELLTCCEEGKGEIKDGLEVMLSVPKRANDAMHLSMLEGFDENIESQGELILQESFQVWDPKTLIRKGRERHLFLFEMSLVFSKEVKDSSGRSKYLYKSKLFTSELGVTEHVEGDPCKFALWVGRTPTSDNKIVLKASSIENKQDWIKHIREVIQERTIHLKGALKEPIHIPKTAPATRQKGRRDGEDLDSQGDGSSQPDTISIASRTSQNTLDSDKLSGGCELTVVIHDFTACNSNELTIRRGQTVEVLERPHDKPDWCLVRTTDRSPAAEGLVPCGSLCIAHSRSSMEMEGIFNHKDSLSVSSNDASPPASVASLQPHMIGAQSSPGPKRPGNTLRKWLTSPVRRLSSGKADGHVKKLAHKHKKSREVRKSADAGSQKDSDDSAATPQDETVEERGRNEGLSSGTLSKSSSSGMQSCGEEEGEEGADAVPLPPPMAIQQHSLLQPDSQDDKASSRLLVRPTSSETPSAAELVSAIEELVKSKMALEDRPSSLLVDQGDSSSPSFNPSDNSLLSSSSPIDEMEERKSSSLKRRHYVLQELVETERDYVRDLGYVVEGYMALMKEDGVPDDMKGKDKIVFGNIHQIYDWHRDFFLGELEKCLEDPEKLGSLFVKHERRLHMYIAYCQNKPKSEHIVSEYIDTFFEDLKQRLGHRLQLTDLLIKPVQRIMKYQLLLKDFLKYSKKASLDTSELERAVEVMCIVPRRCNDMMNVGRLQGFDGKIVAQGKLLLQDTFLVTDQDAGLLPRCRERRIFLFEQIVIFSEPLDKKKGFSMPGFLFKNSIKVSCLCLEENVENDPCKFALTSRTGDVVETFILHSSSPSVRQTWIHEINQILENQRNFLNALTSPIEYQRNHSGGGGGGGSGGSGGGGGSGGGGAPSGGSGHSGGPSSCGGAPSTSRSRPSRIPQPVRHHPPVLVSSAASSQAEADKMSGTSTPGPSLPPPGAAPEAGPSAPSRRPPGADAEGSEREAEPIPKMKVLESPRKGAANASGSSPDAPAKDARASLGTLPLGKPRAGAASPLNSPLSSAVPSLGKEPFPPSSPLQKGGSFWSSIPASPASRPGSFTFPGDSDSLQRQTPRHAAPGKDTDRMSTCSSASEQSVQSTQSNGSESSSSSNISTMLVTHDYTAVKEDEINVYQGEVVQILASNQQNMFLVFRAATDQCPAAEGWIPGFVLGHTSAVIVENPDGTLKKSTSWHTALRLRKKSEKKDKDGKREGKLENGYRKSREGLSNKVSVKLLNPNYIYDVPPEFVIPLSEVTCETGETVVLRCRVCGRPKASITWKGPEHNTLNNDGHYSISYSDLGEATLKIVGVTTEDDGIYTCIAVNDMGSASSSASLRVLGPGMDGIMVTWKDNFDSFYSEVAELGRGRFSVVKKCDQKGTKRAVATKFVNKKLMKRDQVTHELGILQSLQHPLLVGLLDTFETPTSYILVLEMADQGRLLDCVVRWGSLTEGKIRAHLGEVLEAVRYLHNCRIAHLDLKPENILVDESLAKPTIKLADFGDAVQLNTTYYIHQLLGNPEFAAPEIILGNPVSLTSDTWSVGVLTYVLLSGVSPFLDDSVEETCLNICRLDFSFPDDYFKGVSQKAKEFVCFLLQEDPAKRPSAALALQEQWLQAGNGRSTGVLDTSRLTSFIERRKHQNDVRPIRSIKNFLQSRLLPRV

SEQ ID NO: 13770 - protein, 227 aa, Homo Sapiens
MPGCRISACGPGAQEGTAEQRSPPPPWDPMPSSQPPPPTPTLTPTPTPGQSPPLPDAAGASAGAAEDQELQRWRQGASGIAGLAGPGGGSGAAAGAGGRALELAEARRRLLEVEGRRRLVSELESRVLQLHRVFLAAELRLAHRAESLSRLSGGVAQAELYLAAHGSRLKKGPRRGRRGRPPALLASALGLGGCVPWGAGRLRRGHGPEPDSPFRRSPPRGPASPQR

SEQ ID NO: 13771 - protein, 50 aa, Homo Sapiens
  misc_feature (1)..(1): Xaa can be any naturally occurring amino acid
XGRPPALLASALGLGGCVPWGAGRLRRGHGPEPDSPFRRSPPRGPASPQR

SEQ ID NO: 13772 - protein, 156 aa, Homo Sapiens
MRLRMELGAPEEMGQVPPLDSRPSSPALYFTHDASLVHKSPDPFGAVAAQKFSLAHSMLAISGHLDSDDDSGSGSLVGIDNKIEQAMDLVKSHLMFAVREEVEVLKEQIRELAERNAALEQENGLLRALASPEQLAQLPSSGVPRLGPPAPNGPSV

SEQ ID NO: 13773 - protein, 395 aa, Homo Sapiens
MSGGKKKSSFQITSVTTDYEGPGSPGASDPPTPQPPTGPPPRLPNGEPSPDPGGKGTPRNGSPPPGAPSSRFRVVKLPHGLGEPYRRGRWTCVDVYERDLEPHSFGGLLEGIRGASGGAGGRSLDSRLELASLGLGAPTPPSGLSQGPTSWLRPPPTSPGPQARSFTGGLGQLVVPSKAKAEKPPLSASSPQQRPPEPETGESAGTSRAATPLPSLRVEAEAGGSGARTPPLSRRKAVDMRLRMELGAPEEMGQVPPLDSRPSSPALYFTHDASLVHKSPDPFGAVAAQKFSLAHSMLAISGHLDSDDDSGSGSLVGIDNKIEQAMDLVKSHLMFAVREEVEVLKEQIRELAERNAALEQENGLLRALASPEQLAQLPSSGVPRLGPPAPNGPSV

SEQ ID NO: 13774 - protein, 168 aa, Homo Sapiens
  misc_feature (1)..(1): Xaa can be any naturally occurring amino acid
XHCLLSACLAPARPCSARGALSPPGIPFTASLSIGGVSKDPFPLGMAQPGVSVKSLVSSYETRVVGMAPGLPRKRGCASSPCSPRGASPIRGTSGPPPHRGLGGPGQRPSTRRGMDKTLLSLILYCHSGSGSLVGIDNKIEQAMPSRHWAGDEAPTPLTLCLSRGPQD

SEQ ID NO: 13775 - protein, 211 aa, Homo Sapiens
  misc_feature (1)..(1): Xaa can be any naturally occurring amino acid
XLLSACLAPARPCSARGALSPPGIPFTASLSIGGVSKDPFPLGMAQPGVSVKSLVSSYETRVVGMAPGLPRKRGCASSPCSPRGASPIRGTSGPPPHRGLGGPGQRPSTRRGMDKTLLSLILYCHSGSGSLVGIDNKIEQAMDLVKSHLMFAVREEVEVLKEQIRELAERNAALEQENGLLRALASPEQLAQLPSSGVPRLGPPAPNGPSV

SEQ ID NO: 13776 - protein, 138 aa, Homo Sapiens
MTALFLMSMLFGLTCGQAMSFCIPTEYTMHIERRECAYCLTINTTICAGYCMTRDINGKLFLPKYALSQDVCTYRDFIYRTVEIPGCPLHVAPYFSYPVALSCKCGKCNTDYSDCIHEAIKTNYCTKPQKSYLVGFSV

SEQ ID NO: 13777 - protein, 138 aa, Homo Sapiens; identical to SEQ ID NO: 13776

SEQ ID NO: 13778 - protein, 231 aa, Homo Sapiens
MRPADLLQLVLLLDLPRDLGGMGCSSPPCECHQEEDFRVTCKDIQRIPSLPPSTQTLKLIETHLRTIPSHAFSNLPNISRIYVSIDVTLQQLESHSFYNLSKVTHIEIRNTRNLTYIDPDALKELPLLKFLGIFNTGLKMFPDLTKVYSTDIFFILEITDNPYMTSIPVNAFQGLCNETLTLKLYNNGFTSVQGYAFNGTKLDAVYLNKNKYLTVIDKDAFGGVYSGPSLL

SEQ ID NO: 13779 - protein, 764 aa, Homo Sapiens
MRPADLLQLVLLLDLPRDLGGMGCSSPPCECHQEEDFRVTCKDIQRIPSLPPSTQTLKLIETHLRTIPSHAFSNLPNISRIYVSIDVTLQQLESHSFYNLSKVTHIEIRNTRNLTYIDPDALKELPLLKFLGIFNTGLKMFPDLTKVYSTDIFFILEITDNPYMTSIPVNAFQGLCNETLTLKLYNNGFTSVQGYAFNGTKLDAVYLNKNKYLTVIDKDAFGGVYSGPSLLDVSQTSVTALPSKGLEHLKELIARNTWTLKKLPLSLSFLHLTRADLSYPSHCCAFKNQKKIRGILESLMCNESSMQSLRQRKSVNALNSPLHQEYEENLGDSIVGYKEKSKFQDTHNNAHYYVFFEEQEDEIIGFGQELKNPQEETLQAFDSHYDYTICGDSEDMVCTPKSDEFNPCEDIMGYKFLRIVVWFVSLLALLGNVFVLLILLTSHYKLNVPRFLMCNLAFADFCMGMYLLLIASVDLYTHSEYYNHAIDWQTGPGCNTAGFFTVFASELSVYTLTVITLERWYAITFAMRLDRKIRLRHACAIMVGGWVCCFLLALLPLVGISSYAKVSICLPMDTETPLALAYIVFVLTLNIVAFVIVCCCYVKIYITVRNPQYNPGDKDTKIAKRMAVLIFTDFICMAPISFYALSAILNKPLITVSNSKILLVLFYPLNSCANPFLYAIFTKAFQRDVFILLSKFGICKRQAQAYRGQRVPPKNSTDIQVQKVTHEMRQGLHNMEDVYELIENSHLTPKKQGQISEEYMQTVL

SEQ ID NO: 13780 - protein, 764 aa, Homo Sapiens; identical to SEQ ID NO: 13779

SEQ ID NO: 13781 - protein, 253 aa, Homo Sapiens
MRPADLLQLVLLLDLPRDLGGMGCSSPPCECHQEEDFRVTCKDIQRIPSLPPSTQTLKLIETHLRTIPSHAFSNLPNISRIYVSIDVTLQQLESHSFYNLSKVTHIEIRNTRNLTYIDPDALKELPLLKFLGIFNTGLKMFPDLTKVYSTDIFFILEITDNPYMTSIPVNAFQGLCNETLTLKLYNNGFTSVQGYAFNGTKLDAVYLNKNKYLTVIDKDAFGGVYSGPSLLLPLGRKSLSFETQKAPRSSMPS

SEQ ID NO: 13782 - protein, 274 aa, Homo Sapiens
MRPADLLQLVLLLDLPRDLGGMGCSSPPCECHQEEDFRVTCKDIQRIPSLPPSTQTLKLIETHLRTIPSHAFSNLPNISRIYVSIDVTLQQLESHSFYNLSKVTHIEIRNTRNLTYIDPDALKELPLLKFLGIFNTGLKMFPDLTKVYSTDIFFILEITDNPYMTSIPVNAFQGLCNETLTLKLYNNGFTSVQGYAFNGTKLDAVYLNKNKYLTVIDKDAFGGVYSGPSLLVENVAVSGKGFCKSLFSWLYRLPLGRKSLSFETQKAPRSSMPS

SEQ ID NO: 13783 - protein, 112 aa, Homo Sapiens
MRPADLLQLVLLLDLPRDLGGMGCSSPPCECHQEEDFRVTCKDIQRIPSLPPSTQTLKLIETHLRTIPSHAFSNLPNISRIYVSIDVTLQQLESHSFYNLSKVTHITDTDAL

SEQ ID NO: 13784 - protein, 89 aa, Homo Sapiens
MRPADLLQLVLLLDLPRDLGGMGCSSPPCECHQEEDFRVTCKDIQRIPSLPPSTQTLYWRRERKKVWELEIKFNIEGDILNPSQEERKS

SEQ ID NO: 13785 - protein, 399 aa, Homo Sapiens
  misc_feature (1)..(1): Xaa can be any naturally occurring amino acid
XGQELKNPQEETLQAFDSHYDYTICGDSEDMVCTPKSDEFNPCEDIMGYKFLRIVVWFVSLLALLGNVFVLLILLTSHYKLNVPRFLMCNLAFADFCMGMYLLLIASVDLYTHSEYYNHAIDWQTGPGCNTAGFFTVFASELSVYTLTVITLERWYAITFAMRLDRKIRLRHACAIMVGGWVCCFLLALLPLVGISSYAKVSICLPMDTETPLALAYIVFVLTLNIVAFVIVCCCYVKIYITVRNPQYNPGDKDTKIAKRMAVLIFTDFICMAPISFYALSAILNKPLITVSNSKILLVLFYPLNSCANPFLYAIFTKAFQRDVFILLSKFGICKRQAQAYRGQRVPPKNSTDIQVQKVTHEMRQGLHNMEDVYELIENSHLTPKKQGQISEEYMQTVL

SEQ ID NO: 13786 - protein, 105 aa, Homo Sapiens
MPWPLLLLLAVSGAQTTRPCFPGCQCEVETFGLFDSFSLTRVDCSGLGPHIMPVPIPLDTAHLDLSSNRLEMVNESVLAGPGYTTLAGLDLSHNLLTSISPTAFS

SEQ ID NO: 13787 - protein, 150 aa, Homo Sapiens
MPWPLLLLLAVSGAQTTRPCFPGCQCEVETFGLFDSFSLTRVDCSGLGPHIMPVPIPLDTAHLDLSSNRLEMVNESVLAGPGYTTLAGLDLSHNLLTSISPTAFSRLRYLESLDLSHNGLTALPAESFTSSPLSDVNLSHNQLREVSVSA

SEQ ID NO: 13788 - protein, 353 aa, Homo Sapiens
MPWPLLLLLAVSGAQTTRPCFPGCQCEVETFGLFDSFSLTRVDCSGLGPHIMPVPIPLDTAHLDLSSNRLEMVNESVLAGPGYTTLAGLDLSHNLLTSISPTAFSRLRYLESLDLSHNGLTALPAESFTSSPLSDVNLSHNQLREVSVSAFTTHSQGRALHVDLSHNLIHRLVPHPTRAGLPAPTIQSLNLAWNRLHAVPNLRDLPLRYLSLDGNPLAVIGPGAFAGLGGLTHLSLASLQRLPELAPSGFRELPGLQVLDLSGNPKLNWAGAEVFSGLSSLQELDLSGTNLVPLPEALLLHLPALQSVSVGQDVRCRRLVREGTYPRRPGSSPKVALHCVDTRDSAARGPTIL

SEQ ID NO: 13789 - protein, 353 aa, Homo Sapiens; identical to SEQ ID NO: 13788

SEQ ID NO: 13790 - protein, 353 aa, Homo Sapiens; identical to SEQ ID NO: 13788

SEQ ID NO: 13791 - protein, 63 aa, Homo Sapiens
MFAMKTKAALAIWCPGYSETQINATQAMKKRRKRKVTTNKCLEQVSQLQGLWRRFNRPLLKQQ

SEQ ID NO: 13792 - protein, 159 aa, Homo Sapiens
MFPFALLYVLSVSFRKIFILQLVGLVLTYDFTNCDFEKIKAAYLSTISKDLITYMSGTKSTEFNNTVSCSNRPHCLTEIQSLTFNPTAGCASLAKEMFAMKTKAALAIWCPGYSETQINATQAMKKRRKRKVTTNKCLEQVSQLQGLWRRFNRPLLKQQ

SEQ ID NO: 13793 - protein, 159 aa, Homo Sapiens
MKCLGQSKKEEVSFRKIFILQLVGLVLTYDFTNCDFEKIKAAYLSTISKDLITYMSGTKSTEFNNTVSCSNRPHCLTEIQSLTFNPTAGCASLAKEMFAMKTKAALAIWCPGYSETQINATQAMKKRRKRKVTTNKCLEQVSQLQGLWRRFNRPLLKQQ

SEQ ID NO: 13794 - protein, 189 aa, Homo Sapiens
MGQCGITSSKTVLVFLNLIFWFVIILLLVFVTEVVVVVLGYVYRAKVENEVDRSIQKVYKTYNGTNPDAASRAIDYVQRQLHCCGIHNYSDWENTDWFKETKNQSVPLSCCRETASNCNGSLAHPSDLYAEGCEALVVKKLQEIMMHVIWAALAFAAIQLLGMLCACIVLCRRSRDPAYELLITGGTYA

SEQ ID NO: 13795 - protein, 253 aa, Homo Sapiens
MGQCGITSSKTVLVFLNLIFWGAAGILCYVGAYVFITYDDYDHFFEDVYTLIPAVVIIAVGALLFIIGLIGCCATIRESRCGLATFVIILLLVFVTEVVVVVLGYVYRAKVENEVDRSIQKVYKTYNGTNPDAASRAIDYVQRQLHCCGIHNYSDWENTDWFKETKNQSVPLSCCRETASNCNGSLAHPSDLYAEGCEALVVKKLQEIMMHVIWAALAFAAIQLLGMLCACIVLCRRSRDPAYELLITGGTYA

SEQ ID NO: 13796 - protein, 228 aa, Homo Sapiens
MGQCGITSSKTVLVFLNLIFWGAAGILCYVGAYVFITYDDYDHFFEDVYTLIPAVVIIAVGALLFIIGLIGCCATIRESRCGLATVENEVDRSIQKVYKTYNGTNPDAASRAIDYVQRQLHCCGIHNYSDWENTDWFKETKNQSVPLSCCRETASNCNGSLAHPSDLYAEGCEALVVKKLQEIMMHVIWAALAFAAIQLLGMLCACIVLCRRSRDPAYELLITGGTYA

SEQ ID NO: 13797 - protein, 164 aa, Homo Sapiens
MGQCGITSSKTVLVFLNLIFWVENEVDRSIQKVYKTYNGTNPDAASRAIDYVQRQLHCCGIHNYSDWENTDWFKETKNQSVPLSCCRETASNCNGSLAHPSDLYAEGCEALVVKKLQEIMMHVIWAALAFAAIQLLGMLCACIVLCRRSRDPAYELLITGGTYA

SEQ ID NO: 13798 - protein, 45 aa, Homo Sapiens
MMHVIWAALAFAAIQLLGMLCACIVLCRRSRDPAYELLITGGTYA

SEQ ID NO: 13799 - protein, 45 aa, Homo Sapiens; identical to SEQ ID NO: 13798

SEQ ID NO: 13800 - protein, 72 aa, Homo Sapiens
MIILGLVFIFQFVISCSCLAINRSKQTDVINASWWVMSNKTRDELERSFDCCGLFNLTTLYQQDYDFCTAIC

SEQ ID NO: 13801 - protein, 86 aa, Homo Sapiens
MIILGLVFIFQFVISCSCLAINRSKQTDVINASWWVMSNKTRDELERSFDCCGLFNLTTLYQQDYDFCTAICKSQSPTCQMCGEKF

SEQ ID NO: 13802 - protein, 126 aa, Homo Sapiens
MVCGGFACSKNALCALNVVYMLVSLLLIGVAAWGKGLGLVSSIHIIGGVIAVGVFLLLIAVAGLICKSQSPTCQMCGEKFLKHSDEALKILGGVGLFFSFTEILGVWLAMRFRNQKDPRANPSAFL

SEQ ID NO: 13803 - protein, 128 aa, Homo Sapiens
MVCGGFACSKNALCALNVVYMLVSLLLIGVAAWGKGLGLVSSIHIIGGVIAVGVFLLLIAVAGLVGAVNHHQVLLFFYMIILGLVFIFQFVISCSCLAINRSKQIILRCTASGLLGYLLPLGCLVNFP

SEQ ID NO: 13804 - protein, 113 aa, Homo Sapiens
MVCGGFACSKNALCALNVVYMLVSLLLIGVAAWGKGLGLVSSIHIIGGVIAVGVFLLLIAVAGLVGAVNHHQVLLFFYMIILGLVFIFQFVISCSCLAINRSKQMSSMLLGGS

SEQ ID NO: 13805 - protein, 210 aa, Homo Sapiens
MVCGGFACSKNALCALNVVYMLVSLLLIGVAAWGKGLGLVSSIHIIGGVIAVGVFLLLIAVAGLVGAVNHHQVLLFFYMIILGLVFIFQFVISCSCLAINRSKQTDVINASWWVMSNKTRDELERSFDCCGLFNLTTLYQQDYDFCTAICKSQSPTCQMCGEKFLKHSDEALKILGGVGLFFSFTEILGVWLAMRFRNQKDPRANPSAFL

SEQ ID NO: 13806 - protein, 127 aa, Homo Sapiens
MVCGGFACSKNALCALNVVYMTDVINASWWVMSNKTRDELERSFDCCGLFNLTTLYQQDYDFCTAICKSQSPTCQMCGEKFLKHSDEALKILGGVGLFFSFTEILGVWLAMRFRNQKDPRANPSAFL

SEQ ID NO: 13807 - protein, 38 aa, Homo Sapiens
MSALLSLCFVLPLAAPGHGTQGWEPCTACSSLKAWAEC

SEQ ID NO: 13808 - protein, 669 aa, Homo Sapiens
MSALLSLCFVLPLAAPGHGTQGWEPCTDLRPLDILAEVVPSDGATSGIRIVQVHGARGLQLSVAAPRTMSFPASRIFSQCDLFPEEFSIVVTLRVPNLPPKRNEYLLTVVAEESDLLLLGLRLSPAQLHFLFLREDTAGAWQTRVSFRSPALVDGRWHTLVLAVSAGVFSLTTDCGLPVDIMADVPFPATLSVKGARFFVGSRRRAKGLFMGLVRQLVLLPGSDATPRLCPSRNAPLAVLSIPRVLQALTGKPEDNEVLKYPYETNIRVTLGPQPPCTEVEDAQFWFDASRKGLYLCVGNEWVSVLAAKERLDYVEEHQNLSTNSETLGIEVFRIPQVGLFVATANRKATSAVYKWTEEKFVSYQNIPTHQAQAWRHFTIGKKIFLAVANFEPDEKGQEFSVIYKWSHRKLKFTPYQSIATHSARDWEAFEVDGEHFLAVANHREGDNHNIDSVIYKWNPATRLFEANQTIATSGAYDWEFFSVGPYSFLVVANTFNGTSTKVHSHLYIRLLGSFQLFQSFPTFGAADWEVFQIGERIFLAVANSHSYDVEMQVQNDSYVINSVIYELNVTAQAFVKFQDILTCSALDWEFFSVGEDYFLVVANSFDGRTFSVNSIIYRWQGYEGFVAVHSLPTVGCRDWEAFSTTAGAYLIYSSAKEPLSRVLRLRTR

SEQ ID NO: 13809 - protein, 669 aa, Homo Sapiens; identical to SEQ ID NO: 13808

SEQ ID NO: 13810 - protein, 601 aa, Homo Sapiens
MSFPASRIFSQCDLFPEEFSIVVTLRVPNLPPKRNEYLLTVVAEESDLLLLGLRLSPAQLHFLFLREDTAGAWQTRVSFRSPALVDGRWHTLVLAVSAGVFSLTTDCGLPVDIMADVPFPATLSVKGARFFVGSRRRAKGLFMGLVRQLVLLPGSDATPRLCPSRNAPLAVLSIPRVLQALTGKPEDNEVLKYPYETNIRVTLGPQPPCTEVEDAQFWFDASRKGLYLCVGNEWVSVLAAKERLDYVEEHQNLSTNSETLGIEVFRIPQVGLFVATANRKATSAVYKWTEEKFVSYQNIPTHQAQAWRHFTIGKKIFLAVANFEPDEKGQEFSVIYKWSHRKLKFTPYQSIATHSARDWEAFEVDGEHFLAVANHREGDNHNIDSVIYKWNPATRLFEANQTIATSGAYDWEFFSVGPYSFLVVANTFNGTSTKVHSHLYIRLLGSFQLFQSFPTFGAADWEVFQIGERIFLAVANSHSYDVEMQVQNDSYVINSVIYELNVTAQAFVKFQDILTCSALDWEFFSVGEDYFLVVANSFDGRTFSVNSIIYRWQGYEGFVAVHSLPTVGCRDWEAFSTTAGAYLIYSSAKEPLSRVLRLRTR

SEQ ID NO: 13811 - protein, 123 aa, Homo Sapiens
DIAVKWRRIADPDQPVLWLDQMPARSLSRGFNNHINLIRGQVINMRYLEYFEKILHFIKDRILVYHGANNPKGLLEVREALEKVHKVEDLLPIMKVTLASEWQSMFLEEKKTNSTFLKRTQNY

SEQ ID NO: 13812 - protein, 166 aa, Homo Sapiens
MAPAGCCCCCCFWGGAVAAAGAARRVLLLLLLGVLSAGLRPGALATEHYSPLSLLKQELQHRQQQEAPAGGGGCSPQSGDWGDQYSAECGAIAYVLIGSGLYDEAIRHFSTMLQILSPLGRINEAVNDLTKAIQLQPSARLYRHRGTLYFISEDYATAHEDFQQSL

SEQ ID NO: 13813 - protein, 860 aa, Homo Sapiens
MAPAGCCCCCCFWGGAVAAAGAARRVLLLLLLGVLSAGLRPGALATEHYSPLSLLKQELQHRQQQEAPAGGGGCSPQSGDWGDQYSAECGESSFLNFHDSDCEPKGSSPCDSLLSLNTEKILSQAKSIAEQKRFPFATDNDSTNEELAIAYVLIGSGLYDEAIRHFSTMLQEEPDLVSAIYGRGIAYGKKGLHDIKNAELALFELSRVITLEPDRPEVFEQRAEILSPLGRINEAVNDLTKAIQLQPSARLYRHRGTLYFISEDYATAHEDFQQSLELNKNQPIAMLYKGLTFFHRGLLKEAIESFKEALKQKVDFIDAYKSLGQAYRELGNFEAATESFQKALLLNQNHVQTLQLRGMMLYHHGSLQEALKNFKRCLQLEPYNEVCQYMKGLSHVAMGQFYEGIKAQTKVMLNDPLPGQKASPEYLKVKYLREYSRYLHAHLDTPLTEYNIDVDLPGSFKDHWAKNLPFLIEDYEEQPGLQPHIKDVLHQNFESYKPEVQELICVADRLGSLMQYETPGFLPNKRIHRAMGLAALEVMQAVQRTWTNSKVRMNGKTRLMQWRDMFDIAVKWRRIADPDQPVLWLDQMPARSLSRGFNNHINLIRGQVINMRYLEYFEKILHFIKDRILVYHGANNPKGLLEVREALEKVHKVEDLLPIMKQFNTKTKDGFTVNTKVPSLKDQGKEYDGFTITITGDKVGNILFSVETQTTEERTQLYHAEIDALYKDLTAKGKVLILSSEFGEADAVCNLILSLVYYFYNLMPLSRGSSVIAYSVIVGALMASGKEVAGKIPKGKLVDFEAMTAPGSEAFSKVAKSWMNLKSISPSYKTLPSVSETFPTLRSMIEVLNTDSSPRCLKKL

SEQ ID NO: 13814 - protein, 806 aa, Homo Sapiens
MAPAGCCCCCCFWGGAVAAAGAARRVLLLLLLGVLSAGLRPGALATEHYSPLSLLKQELQHRQQQEAPAGGGGCSPQSGDWGDQYSAECGESSFLNFHDSDCEPKGSSPCDSLLSLNTEKILSQAKSIAEQKRFPFATDNDSTNEELAIAYVLIGSGLYDEAIRHFSTMLQILSPLGRINEAVNDLTKAIQLQPSARLYRHRGTLYFISEDYATAHEDFQQSLELNKNQPIAMLYKGLTFFHRGLLKEAIESFKEALKQKVDFIDAYKSLGQAYRELGNFEAATESFQKALLLNQNHVQTLQLRGMMLYHHGSLQEALKNFKRCLQLEPYNEVCQYMKGLSHVAMGQFYEGIKAQTKVMLNDPLPGQKASPEYLKVKYLREYSRYLHAHLDTPLTEYNIDVDLPGSFKDHWAKNLPFLIEDYEEQPGLQPHIKDVLHQNFESYKPEVQELICVADRLGSLMQYETPGFLPNKRIHRAMGLAALEVMQAVQRTWTNSKVRMNGKTRLMQWRDMFDIAVKWRRIADPDQPVLWLDQMPARSLSRGFNNHINLIRGQVINMRYLEYFEKILHFIKDRILVYHGANNPKGLLEVREALEKVHKVEDLLPIMKFNTKTKDGFTVNTKVPSLKDQGKEYDGFTITITGDKVGNILFSVETQTTEERTQLYHAEIDALYKDLTAKGKVLILSSEFGEADAVCNLILSLVYYFYNLMPLSRGSSVIAYSVIVGALMASGKEVAGKIPKGKLVDFEAMTAPGSEAFSKVAKSWMNLKSISPSYKTLPSVSETFPTLRSMIEVLNTDSSPRCLKKL

SEQ ID NO: 13815 - protein, 255 aa, Homo Sapiens
MAPAGCCCCCCFWGGAVAAAGAARRVLLLLLLGVLSAGLRPGALATEHYSPLSLLKQELQHRQQQEAPAGGGGCSPQSGDWGDQYSAECGESSFLNFHDSDCEPKGSSPCDSLLSLNTEKILSQAKSIAEQKRFPFATDNDSTNEELAIAYVLIGSGLYDEAIRHFSTMLQILSPLGRINEAVNDLTKAIQLQPSARLYRHRGTLYFISENEVESCAVIRQEPRNQRLLKAEEKSDFEELWRPSMLKLLNPSKKL

SEQ ID NO: 13816 - protein, 150 aa, Homo Sapiens
MAPAGCCCCCCFWGGAVAAAGAARRVLLLLLLGVLSAGLRPGALATEHYSPLSLLKQELQHRQQQEAPAGGGGCSPQSGDWGDQYSAECGESSFLNFHDSDCEPKGSSPCDSLLSLNTEKILSQAKSIAEQKRFPFATDNDSTNEELDIY

SEQ ID NO: 13817 - protein, 186 aa, Homo Sapiens
  misc_feature (1)..(1): Xaa can be any naturally occurring amino acid
XWGGAVAAAGAARRVLLLLLLGVLSAGLRPGALATEHYSPLSLLKQELQHRQQQEAPAGGGGCSPQSGDWGDQYSAECGESSFLNFHDSDCEPKGSSPCDSLLSLNTEKILSQAKSIAEQKRFPFATDNDSTNEELAIAYVLIGSGLYDEAIRHFSTMLQEAIESFKEALKQKVDFIDAYKSLGQA

SEQ ID NO: 13818 - protein, 149 aa, Homo Sapiens
GRGGSMFRLLSWSLGRGFLRAAGRRCRGCSARLLPGLAGGPGPEVQVPPSRVAPHGRGPGLLPLLAALAWFSRPAAAEEEEQQGADGAAAEDGADEAEAEIIQLLKRAKLSIMKDEPEEAELILHDALRLAYQTDNKKAITYTYDLINW

SEQ ID NO: 13819 - protein, 380 aa, Homo Sapiens
MFRLLSWSLGRGFLRAAGRRCRGCSARLLPGLAGGPGPEVQVPPSRVAPHGRGPGLLPLLAALAWFSRPAAAEEEEQQGADGAAAEDGADEAEAEIIQLLKRAKLSIMKDEPEEAELILHDALRLAYQTDNKKAITYTYDLMANLAFIRGQLENAEQLFKATMSYLLGGGMKQEDNAIIEISLKLASIYAAQNRQEFAVAGYEFCISTLEEKIEREKELAEDIMSVEEKANTHLLLGMCLDACARYLLFSKQPSQAQRMYEKALQISEEIQGERHPQTIVLMSDLATTLDAQGRFDEAYIYMQRASDLARQINHPELHMVLSNLAAVLMHRERYTQAKEIYQEALKQAKLKKDEISVQHIREELAELSKKSRPLTNSVKL

SEQ ID NO: 13820 - protein, 99 aa, Homo Sapiens
SKQPSQAQRMYEKALQISEEIQGERHPQTIVLMSDLATTLDAQGRFDEAYIYMQRASDLARQINHPELHMVLSNLAAVLMHRAATTVLGPSKEAKATLG

SEQ ID NO: 13821 - protein, 63 aa, Homo Sapiens
  misc_feature (1)..(1): Xaa can be any naturally occurring amino acid
XGERHPQTIVLMSDLATTLDAQGRFDEAYIYMQRASDLARQINHPELHMVLSNLAAVLMHRGR

SEQ ID NO: 13822 - protein, 166 aa, Homo Sapiens
  misc_feature (1)..(1): Xaa can be any naturally occurring amino acid
XQERVWPAVRRGRGGSMFRLLSWSLGRGFLRAAGRRCRGCSARLLPGLAGGPGPEVQVPPSRVAPHGRGPGLLPLLAALAWFSRPAAAEEEEQQGADGAAAEDGADEAEAEIIQLLKRAKVRRLRALRPAERGSLCERGLGVAAHYSLRLAEEWMEAPRVKLPRMS

SEQ ID NO: 13823 - protein, 172 aa, Homo Sapiens
  misc_feature (1)..(1): Xaa can be any naturally occurring amino acid
XRRVVGGQERVWPAVRRGRGGSMFRLLSWSLGRGFLRAAGRRCRGCSARLLPGLAGGPGPEVQVPPSRVAPHGRGPGLLPLLAALAWFSRPAAAEEEEQQGADGAAAEDGADEAEAEIIQLLKRAKVRRLRALRPAERGSLCERGLGVAAHYSLRLAEEWMEAPRVKLPRMS

SEQ ID NO: 13824 - protein, 239 aa, Homo Sapiens
MQRGALSPVLMLSAAPEPPPRPPPALSPPGSGPGSGSRHGSARPGPTPEPSGSLGAALDSSLRAAVAFKAEGQRCYREKKFREAIGKYHRALLQLKAAQGARPSGLPAPAPGPTSSPGPARLSEEQRRLVESTEVECYDSLTACLLQSELVNYERVREYCLKVLEKQQGNFKATYRAGIAFYHLGDYARALRYLQEARSREPTDTNVLRYIQLTQLKMNRCSLQREDSGAGSQTRDVIG

SEQ ID NO: 13825 - protein, 800 aa, Homo Sapiens
MAAAASVTGRVTWAASPMRSLGLGRRLSLPGPRLDAVTAAVNPSLSDHGNGLGRGTRGSGCSGGSLVADWGGGAAAAAAVALALAPALSTMRRGSSESELAARWEAEAVAAAKAAAKAEAEATAETVAEQVRVDAGAAGEPECKAGEEQPKVLAPAPAQPSAAEEGNTQVLQRPPPTLPPSKPKPVQGLCPHGKPRDKGRSCKRSSGHGSGENGSQRPVTVDSSKARTSLDALKISIRQLKWKEFPFGRRLPCDIYWHGVSFHDNDIFSGQVNKFPGMTEMVRKITLSRAVRTMQNLFPEEYNFYPRSWILPDEFQLFVAQVQMVKDDDPSWKPTFIVKPDGGCQGDGIYLIKDPSDIRLAGTLQSRPAVVQEYICKPLLIDKLKFDIRLYVLLKSLDPLEIYIAKDGLSRFCTEPYQEPTPKNLHRIFMHLTNYSLNIHSGNFIHSDSASTGSKRTFSSILCRLSSKGVDIKKVWSDIISVVIKTVIALTPELKVFYQSDIPTGRPGPTCFQILGFDILLMKNLKPILLEVNANPSMRIEHEHELSPGVFENVPSLVDEEVKVAVIRDTLRLMDPLKKKRENQSQQLEKPFAGKEDALDGELTSAPDCNANPEAHLPSICLKQVFPKYAKQFNYLRLVDRMANLFIRFLGIKGTMKLGPTGFRTFIRSCKLSSSSLSMAAVDILYIDITRRWNSMTLDQRDSGMCLQAFVEAFFFLAQRKFKMLPLHEQVASLIDLCEYHLSLLDEKRLVCGRGVPSGGRPPHRGPPQEPSPSAQPAGDNPPPRTSCANKLSHPRHTLS

SEQ ID NO: 13826 - protein, 538 aa, Homo Sapiens
MAAAASVTGRVTWAASPMRSLGLGRRLSLPGPRLDAVTAAVNPSLSDHGNGLGRGTRGSGCSGGSLVADWGGGAAAAAAVALALAPALSTMRRGSSESELAARWEAEAVAAAKAAAKAEAEATAETVAEQVRVDAGAAGEPECKAGEEQPKVLAPAPAQPSAAEEGNTQVLQRPPPTLPPSKPKPVQGLCPHGKPRDKGRSCKRSSGHGSGENGSQRPVTVDSSKARTSLDALKISIRQLKWKEFPFGRRLPCDIYWHGVSFHDNDIFSGQVNKFPGMTEMVRKITLSRAVRTMQNLFPEEYNFYPRSWILPDEFQLFVAQVQMVKDDDPSWKPTFIVKPDGGCQGDGIYLIKDPSDIRLAGTLQSRPAVVQEYICKPLLIDKLKFDIRLYVLLKSLDPLEIYIAKDGLSRFCTEPYQEPTPKNLHRIFMHLTNYSLNIHSGNFIHSDSASTGSKRTFSSILCRLSSKGVDIKKVWSDIISVVIKTVIALTPELKVFYQSDIPTGRPGPTCFQVTIASSQPAFPALTGLKRALWLRVG

SEQ ID NO: 13827 - protein, 239 aa, Homo Sapiens
  misc_feature (1)..(1): Xaa can be any naturally occurring amino acid
XSDHGNGLGRGTRGSGCSGGSLVADWGGGAAAAAAVALALAPALSTMRRGSSESELAARWEAEAVAAAKAAAKAEAEATAETVAEQVRVDAGAAGEPECKAGEEQPKVLAPAPAQPSAAEEGNTQVLQRPPPTLPPSKPKPVQGLCPHGKPRDKGRSCKRSSGHGSGENGSQRPVTVDSSKARTSLDALKISIRQLKWKEFPFGRRLPCDIYWHGVSFHDNDIFSGQVNKFPGSNGERR

SEQ ID NO: 13828 - protein, 122 aa, Homo Sapiens
  misc_feature (1)..(1): Xaa can be any naturally occurring amino acid
XSSGHGSGENGSQRPVTVDSSKARTSLDALKISIRQLKWKEFPFGRRLPCDIYWHGVSFHDNDIFSGQVNKFPGMTEMVRKITLSRAVRTMQNLFPEESTSANLSLSTSSSLIFVCMSYSSP

SEQ ID NO: 13829 - protein, 66 aa, Homo Sapiens
  misc_feature (1)..(1): Xaa can be any naturally occurring amino acid
XVTVDSSKARTSLDALKISIRQLKWKEFPFGRRLPCDIYWHGVSFHDNDIFSGQVNKFPGSNGERR

SEQ ID NO: 13830 - protein, 185 aa, Homo Sapiens
MASHRLLLLCLAGLVFVSEAGPTGTGESKCPLMVKVLDAVRGSPAINVAVHVFRKAADDTWEPFASGKTSESGELHGLTTEEEFVEGIYKVEIDTKSYWKALGISPFHEHAEVSIQTFESFETDGCHGNRIQTCSSWSELQTSGFHQNVDVVFTANDSGPRRYTIAALLSPYSYSTTAVVTNPKE

SEQ ID NO: 13831 - protein, 147 aa, Homo Sapiens
MASHRLLLLCLAGLVFVSEAGPTGTGESKCPLMVKVLDAVRGSPAINVAVHVFRKAADDTWEPFASGKTSESGELHGLTTEEEFVEGIYKVEIDTKSYWKALGISPFHEHAEVVFTANDSGPRRYTIAALLSPYSYSTTAVVTNPKE

SEQ ID NO: 13832 - protein, 139 aa, Homo Sapiens
MASHRLLLLCLAGLVFVSEAGPTGTGESKCPLMVKVLDAVRGSPAINVAVHVFRKAADDTWEPFASGKTSESGELHGLTTEEEFVEGIYKVEIDTKSYWKALGISPFHEHAEVVFTANDSGPRRYYSYSTTAVVTNPKE

SEQ ID NO: 13833 - protein, 75 aa, Homo Sapiens
MKLHYVAVLTLAILMFLTWLPESLSCNKALCASDVSKCLIQELCQCRPGEGNCSCCKECMLCLGALWDECCDCVD

SEQ ID NO: 13834 - protein, 223 aa, Homo Sapiens
MKLHYVAVLTLAILMFLTWLPESLSCNKALCASDVSKCLIQELCQCRPGEGNCSCCKECMLCLGALWDECCDCVGMCNPRNYSDTPPTSKSTVEELHEPIPSLFRALTEGDTQLNWNIVSFPVAEELSHHENLVSFLETVNQPHHQNVSVPSNNVHAPYSSDKEHMCTVVYFDDCMSIHQCKISCESMGASKYRWFHNACCECIGPECIDYGSKTVKCMNCMF

SEQ ID NO: 13835 - protein, 184 aa, Homo Sapiens
MKLHYVAVLTLAILMFLTWLPESLSCNKALCASDVSKCLIQELCQCRPGEGNCSCCKECMLCLGALWDECCDCVGMCNPRNYSDTPPTSKSTVEELHEPIPSLFRALTEGDTQLNWNIVSFPVAEELSHHENLVSFLETVNQPHHQNVSVPSNNVHAPYSSDKGNCQQLTFSIPPPHVVCPCNL

SEQ ID NO: 13836 - protein, 56 aa, Homo Sapiens
METRPRLGATCLLGFSFLLLVISSDGHNGLGKGFGDHIHWRTLEDGKKEAAARIHV

SEQ ID NO: 13837 - protein, 55 aa, Homo Sapiens
METRPRLGATCLLGFSFLLLVISSDGHNGLGKGFGDHIHWRTLEDGKKEAAARPY

SEQ ID NO: 13838 - protein, 172 aa, Homo Sapiens
METRPRLGATCLLGFSFLLLVISSDGHNGLGKGFGDHIHWRTLEDGKKEAAASGLPLMVIIHKSWCGACKALKPKFAESTEISELSHNFVMVNLEDEEEPKDEDFSPDGGYIPRILFLDPSGKVHPEIINENGNPSYKYFYVSAEQVVQGMKEAQERLTGDAFRKKHLEDEL

SEQ ID NO: 13839 - protein, 179 aa, Homo Sapiens
MKNRRETRETPGNPQLAVAEESGRLWSEEQPAHPLQVGAVYLGEEELLHDPMGQDRAAEEANAVLGLDTQGDHMVMLSVIPGEAEDKVSSEPSGVTCGAGGAEDSRCNVRESLFSLDGAGAHFPDREEEYYTEPEVAESDAAPTEDSNNTESLKSPKVNCEERNITGLENFTLKILNMS

SEQ ID NO: 13840 - protein, 44 aa, Homo Sapiens
MVPAAGRRPPRVMRLLGWCCRGKWSLMVRGAACSPSPGGGCVPG

SEQ ID NO: 13841 - protein, 155 aa, Homo Sapiens
MVPAAGRRPPRVMRLLGWWQVLLWVLGLPVRGVEEESGRLWSEEQPAHPLQVGAVYLGEEELLHDPMGQDRAAEEANAVLGLDTQGDHMVMLSVIPGEAEDKVSSEPSGVTCGAGGAEDSRCNVRESLFSLDGAGAHFPDREEEYYTEPEVAESD

SEQ ID NO: 13842 - protein, 44 aa, Homo Sapiens
MVPAAGRRPPRVMRLLGWWQVLLWVLGLPVRGVEGPYGFSEPKR

SEQ ID NO: 13843 - protein, 360 aa, Homo Sapiens
MVPAAGRRPPRVMRLLGWWQVLLWVLGLPVRGVEVAEESGRLWSEEQPAHPLQVGAVYLGEEELLHDPMGQDRAAEEANAVLGLDTQGDHMVMLSVIPGEAEDKVSSEPSGVTCGAGGAEDSRCNVRESLFSLDGAGAHFPDREEEYYTEPEVAESDAAPTEDSNNTESLKSPKVNCEERNITGLENFTLKILNMSQDLMDFLNPNGSDCTLVLFYTPWCRFSASLAPHFNSLPRAFPALHFLALDASQHSSLSTRFGTVAVPNILLFQGAKPMARFNHTDRTLETLKIFIFNQTGIEAKKNVVVTQADQIGPLPSTLIKSVDWLLVFSLFFLISFIMYATIRTESIRWLIPGQEQEHVE

SEQ ID NO: 13844 - protein, 344 aa, Homo Sapiens
  misc_feature (1)..(1): Xaa can be any naturally occurring amino acid
XFPGVSWMEAGQQRVVEKVAEESGRLWSEEQPAHPLQVGAVYLGEEELLHDPMGQDRAAEEANAVLGLDTQGDHMVMLSVIPGEAEDKVSSEPSGVTCGAGGAEDSRCNVRESLFSLDGAGAHFPDREEEYYTEPEVAESDAAPTEDSNNTESLKSPKVNCEERNITGLENFTLKILNMSQDLMDFLNPNGSDCTLVLFYTPWCRFSASLAPHFNSLPRAFPALHFLALDASQHSSLSTRFGTVAVPNILLFQGAKPMARFNHTDRTLETLKIFIFNQTGIEAKKNVVVTQADQIGPLPSTLIKSVDWLLVFSLFFLISFIMYATIRTESIRWLIPGQEQEHVE

SEQ ID NO: 13845 - protein, 115 aa, Homo Sapiens
  misc_feature (1)..(1): Xaa can be any naturally occurring amino acid
XLALDASQHSRFGTVAVPNILLFQGAKPMARFNHTDRTLETLKIFIFNQTGIEAKKNVVVTQADQIGPLPSTLIKSVDWLLVFSLFFLISFIMYATIRTESIRWLIPGQEQEHVE

SEQ ID NO: 13846 - protein, 324 aa, Homo Sapiens
MEDAKVYVAKVDCTAHSDVCSAQGVRGYPTLKLFKPGQEAVKYQGPRDFQTLENWMLQTLNEEPVTPEPEVEPPSAPELKQGLYELSASNFELHVAQGDHFIKFFAPWCGHCKALAPTWEQLALGLEHSETVKIGKVDCTQHYELCSGNQVRGYPTLLWFRDGKKVDQYKGKRDLESLREYVESQLQRTETGATETVTPSEAPVLAAEPEADKGTVLALTENNFDDTIAEGITFIKFYAPWCGHCKTLAPTWEELSKKEFPGLAGVKIAEVDCTAERNICSKYSVRGYPTLLLFRGGKKVSEHSGGRDLDSLHRFVLSQAKDEL

SEQ ID NO: 13847 - protein, 432 aa, Homo Sapiens
MPARPGRLLPLLARPAALTALLLLLLGHGGGGRWGARAQEAAAAAADGPPAADGEDGQDPHSKHLYTADMFTHGIQSAAHFVMFFAPWCGHCQRLQPTWNDLGDKYNSMEDAKVYVAKVDCTAHSDVCSAQGVRGYPTLKLFKPGQEAVKYQGPRDFQTLENWMLQTLNEEPVTPEPEVEPPSAPELKQGLYELSASNFELHVAQGDHFIKFFAPWCGHCKALAPTWEQLALGLEHSETVKIGKVDCTQHYELCSGNQVRGYPTLLWFRDGKKVDQYKGKRDLESLREYVESQLQRTETGATETVTPSEAPVLAAEPEADKGTVLALTENNFDDTIAEGITFIKFYAPWCGHCKTLAPTWEELSKKEFPGLAGVKIAEVDCTAERNICSKYSVRGYPTLLLFRGGKKVSEHSGGRDLDSLHRFVLSQAKDEL

SEQ ID NO: 13848 - protein, 500 aa, Homo Sapiens
MAAMAVALRGLGGRFRWRTQAVAGGVRGAARGAAAAQLGRKVAVVDYVEPSPQGTRWGLGGTCVNVGCIPKKLMHQAALLGGLIQDAPNYGWEVAQPVPHDWRKMAEAVQNHVKSLNWGHRVQLQDRKVKYFNIKASFVDEHTVCGVAKGGKEILLSADHIIIATGGRPRYPTHIEGALEYGITSDDIFWLKESPGKTLVVGASYVALECAGFLTGIGLDTTIMMRSIPLRGFDQQMSSMVIEHMASHGTRFLRGCAPSRVRRLPDGQLQVTWEDSTTGKEDTGTFDTVLWAIGRVPDTRSLNLEKAGVDTSPDTQKILVDSREATSVPHIYAIGDVVEGRPELTPIAIMAGRLLVQRLFGGSSDLMDYDNVPTTVFTPLEYGCVGLSEEEAVARHGQEHVEVYHAHYKPLEFTVAGRDASQCYVKMVCLREPPQLVLGLHFLGPNAGEVTQGFALGIKCGASYAQVMRTVGIHPTCSEEVVKLRISKRSGLDPTVTGCG

SEQ ID NO: 13849 - protein, 338 aa, Homo Sapiens
MAAMAVALRGLGGRFRWRTQAVAGGVRGAARGAAAGQRDYDLLVVGGGSGGLACAKEAAQLGRKVAVVDYVEPSPQGTRWGLGGTCVNVGCIPKKLMHQAALLGGLIQDAPNYGWEVAQPVPHDWRKMAEAVQNHVKSLNWGHRVQLQDRKVKYFNIKASFVDEHTVCGVAKGGKEILLSADHIIIATGGRPRYPTHIEGALEYGITSDDIFWLKESPGKTLVVGASYVALECAGFLTGIGLDTTIMMRSIPLRGFDQQMSSMVIEHMASHGTRFLRGCAPSRVRRLPDGQLQVTWEDSTTGKEDTGTFDTVLWAIAPCISACLPTTVGHAGKNQRRD

SEQ ID NO: 13850 - protein, 523 aa, Homo Sapiens
MAAMAVALRGLGGRFRWRTQAVAGGVRGAARGAAAGQRDYDLLVVGGGSGGLACAKEAAQLGRKVAVVDYVEPSPQGTRWGLGGTCVNVGCIPKKLMHQAALLGGLIQDAPNYGWEVAQPVPHDWRKMAEAVQNHVKSLNWGHRVQLQDRKVKYFNIKASFVDEHTVCGVAKGGKEILLSADHIIIATGGRPRYPTHIEGALEYGITSDDIFWLKESPGKTLVVGASYVALECAGFLTGIGLDTTIMMRSIPLRGFDQQMSSMVIEHMASHGTRFLRGCAPSRVRRLPDGQLQVTWEDSTTGKEDTGTFDTVLWAIGRVPDTRSLNLEKAGVDTSPDTQKILVDSREATSVPHIYAIGDVVEGRPELTPIAIMAGRLLVQRLFGGSSDLMDYDNVPTTVFTPLEYGCVGLSEEEAVARHGQEHVEVYHAHYKPLEFTVAGRDASQCYVKMVCLREPPQLVLGLHFLGPNAGEVTQGFALGIKCGASYAQVMRTVGIHPTCSEEVVKLRISKRSGLDPTVTGCG

SEQ ID NO: 13851 - protein, 463 aa, Homo Sapiens
MAAMAVALRGLGGRFRWRTQAVAGGVRGAARGAAAGQRDYDLLVVGGGSGGLACAKEGTRWGLGGTCVNVGCIPKKLMHQAALLGGLIQDAPNYGWEVAQPVPHDWRKMAEAVQNHVKSLNWGHRVQLQDRKVKYFNIKASFVDEHTVCGVAKGGKEILLSADHIIIATGGRPRYPTHIEGALEYGITSDDIFWLKESPGKTLVVGASYVALECAGFLTGIGLDTTIMMRSIPLRGFDQQMSSMVIEHMASHGTRFLRGCAPSRVRRLPDGQLQVTWEDSTTGKEDTGTFDTVLWAIGRVPDTRSLNLEKAGVDTSPDTQKILVDSREATSVPHIYAIGDVVEGRPELTPIAIMAGRLLVQRLFGGSSDLMDYDNVPTTVFTPLEYGCVGLSEEEAVARHGQEHVEVYHAHYKPLEFTVAGRDASQCYVKMVCLREPPQLVLGLHFLGPNAGEVTQGFALGIK

SEQ ID NO: 13852 - protein, 522 aa, Homo Sapiens
MAAMAVALRGLGGRFRWRTQAVAGGVRGAARGAAGQRDYDLLVVGGGSGGLACAKEAAQLGRKVAVVDYVEPSPQGTRWGLGGTCVNVGCIPKKLMHQAALLGGLIQDAPNYGWEVAQPVPHDWRKMAEAVQNHVKSLNWGHRVQLQDRKVKYFNIKASFVDEHTVCGVAKGGKEILLSADHIIIATGGRPRYPTHIEGALEYGITSDDIFWLKESPGKTLVVGASYVALECAGFLTGIGLDTTIMMRSIPLRGFDQQMSSMVIEHMASHGTRFLRGCAPSRVRRLPDGQLQVTWEDSTTGKEDTGTFDTVLWAIGRVPDTRSLNLEKAGVDTSPDTQKILVDSREATSVPHIYAIGDVVEGRPELTPIAIMAGRLLVQRLFGGSSDLMDYDNVPTTVFTPLEYGCVGLSEEEAVARHGQEHVEVYHAHYKPLEFTVAGRDASQCYVKMVCLREPPQLVLGLHFLGPNAGEVTQGFALGIKCGASYAQVMRTVGIHPTCSEEVVKLRISKRSGLDPTVTGCG

SEQ ID NO: 13853 - protein, 306 aa, Homo Sapiens
MEAGQRDYDLLVVGGGSGGLACAKEAAQLGRKVAVVDYVEPSPQGTRWGLGGTCVNVGCIPKKLMHQAALLGGLIQDAPNYGWEVAQPVPHDWRKMAEAVQNHVKSLNWGHRVQLQDRKVKYFNIKASFVDEHTVCGVAKGGKEILLSADHIIIATGGRPRYPTHIEGALEYGITSDDIFWLKESPGKTLVVGASYVALECAGFLTGIGLDTTIMMRSIPLRGFDQQMSSMVIEHMASHGTRFLRGCAPSRVRRLPDGQLQVTWEDSTTGKEDTGTFDTVLWAIAPCISACLPTTVGHAGKNQRRD

SEQ ID NO: 13854 - protein, 493 aa, Homo Sapiens
MEDQAGQRDYDLLVVGGGSGGLACAKEAAQLGRKVAVVDYVEPSPQGTRWGLGGTCVNVGCIPKKLMHQAALLGGLIQDAPNYGWEVAQPVPHDWRKMAEAVQNHVKSLNWGHRVQLQDRKVKYFNIKASFVDEHTVCGVAKGGKEILLSADHIIIATGGRPRYPTHIEGALEYGITSDDIFWLKESPGKTLVVGASYVALECAGFLTGIGLDTTIMMRSIPLRGFDQQMSSMVIEHMASHGTRFLRGCAPSRVRRLPDGQLQVTWEDSTTGKEDTGTFDTVLWAIGRVPDTRSLNLEKAGVDTSPDTQKILVDSREATSVPHIYAIGDVVEGRPELTPIAIMAGRLLVQRLFGGSSDLMDYDNVPTTVFTPLEYGCVGLSEEEAVARHGQEHVEVYHAHYKPLEFTVAGRDASQCYVKMVCLREPPQLVLGLHFLGPNAGEVTQGFALGIKCGASYAQVMRTVGIHPTCSEEVVKLRISKRSGLDPTVTGCG

SEQ ID NO: 13855 - protein, 427 aa, Homo Sapiens
MHQAALLGGLIQDAPNYGWEVAQPVPHDWRKMAEAVQNHVKSLNWGHRVQLQDRKVKYFNIKASFVDEHTVCGVAKGGKEILLSADHIIIATGGRPRYPTHIEGALEYGITSDDIFWLKESPGKTLVVGASYVALECAGFLTGIGLDTTIMMRSIPLRGFDQQMSSMVIEHMASHGTRFLRGCAPSRVRRLPDGQLQVTWEDSTTGKEDTGTFDTVLWAIGRVPDTRSLNLEKAGVDTSPDTQKILVDSREATSVPHIYAIGDVVEGRPELTPIAIMAGRLLVQRLFGGSSDLMDYDNVPTTVFTPLEYGCVGLSEEEAVARHGQEHVEVYHAHYKPLEFTVAGRDASQCYVKMVCLREPPQLVLGLHFLGPNAGEVTQGFALGIKCGASYAQVMRTVGIHPTCSEEVVKLRISKRSGLDPTVTGCG

SEQ ID NO: 13856 - protein, 164 aa, Homo Sapiens
MKTGRPELTPIAIMAGRLLVQRLFGGSSDLMDYDNVPTTVFTPLEYGCVGLSEEEAVARHGQEHVEVYHAHYKPLEFTVAGRDASQCYVKMVCLREPPQLVLGLHFLGPNAGEVTQGFALGIKCGASYAQVMRTVGIHPTCSEEVVKLRISKRSGLDPTVTGCG

SEQ ID NO: 13857 - protein, 179 aa, Homo Sapiens
MKTVAGALLSLVMGQPSEGRPELTPIAIMAGRLLVQRLFGGSSDLMDYDNVPTTVFTPLEYGCVGLSEEEAVARHGQEHVEVYHAHYKPLEFTVAGRDASQCYVKMVCLREPPQLVLGLHFLGPNAGEVTQGFALGIKCGASYAQVMRTVGIHPTCSEEVVKLRISKRSGLDPTVTGCG

SEQ ID NO: 13858 - protein, 211 aa, Homo Sapiens
MPLRRTSSRGNAGRPELTPIAIMAGRLLVQRLFGGSSDLMDYDNVPTTVFTPLEYGCVGLSEEEAVARHGQEHVEVYHAHYKPLEFTVAGRDASQCYVKMVCLREPPQLVLGLHFLGPNAGEVTQGFALGIKCGASYAQVMRTVGIHPTCSEEVVKLRISKRSGLDPTVTGCGMAAGQVWGASTLSWSACEMVSVERKCWTGGPCAPQGWL

SEQ ID NO: 13859 - protein, 361 aa, Homo Sapiens
QQMSSMVIEHMASHGTRFLRGCAPSRVRRLPDGQLQVTWEDSTTGKEDTGTFDTVLWAIGRVPDTRSLNLEKAGVDTSPDTQKILVDSREATSVPHIYAIGDVVEGRPELTPIAIMAGRLLVQRLFGGSSDLMDYDNVPTTVFTPLEYGCVGLSEEEAVARHGQEHVEVYHAHYKPLEFTVAGRDASQCYVKMVCLREPPQLVLGLHFLGPNAGEVTQGFALGIKCGASYAQVMRTVGIHPTCSEEVVKLRISKRSGLDPTVTGCGMAAGQVWGASTLSWSACEMVSVERKCWTGGPCAPQGWLRGLSTSPLHLSASAAGHPPPGSWCQMMTTWVETYPVGTHVRAPWHFCNANKEGTFSE

SEQ ID NO: 13860 - protein, 171 aa, Homo Sapiens
  misc_feature (1)..(1): Xaa can be any naturally occurring amino acid
XGVAKGGKEILLSADHIIIATGGRPRYPTHIEGALEYGITSDDIFWLKESPGKTLVVGASYVALECAGFLTGIGLDTTIMMRSIPLRGFDQQMSSMVIEHMASHGTRFLRGCAPSRVRRLPDGQLQVTWEDSTTGKEDTGTFDTVLWAIGLPHPAGCQAGWPLPSAPREQP

SEQ ID NO: 13861 - protein, 247 aa, Homo Sapiens
MAQVPPPASGERHAGTEDGPIRRNPAGNVARPMVQRLPEPQDVAQCLEVGLFDTPPFYSNSTNSFRNTVEGYSDPTGKYDPAVRSLHNLAHLFLNGTGGQTHLSPNDPIFVLLHTFTDAVFDEWLRRYNADISTFPLENAPIGHNRQYNMVPFWPPVTNTEMFVTAPDNLGYTYEIQWPSREFSVPEIIAIAVVGALLLVALIFGTASYLIRARRSMDEANQPLLTDQYQCYAEEYEKLQNPNQSVV

SEQ ID NO: 13862 - protein, 102 aa, Homo Sapiens
MSAPKLLSLGCIFFPLLLFQQARAQFPRQCATVEALRSGMCCPDLSPVSGPGTDRCGSSSGRGRCEAVTADSRPHSPQYPHDGRDDREVWPLRFFNRTCHCN

SEQ ID NO: 13863 - protein, 537 aa, Homo Sapiens
MSAPKLLSLGCIFFPLLLFQQARAQFPRQCATVEALRSGMCCPDLSPVSGPGTDRCGSSSGRGRCEAVTADSRPHSPQYPHDGRDDREVWPLRFFNRTCHCNGNFSGHNCGTCRPGWRGAACDQRVLIVRRNLLDLSKEEKNHFVRALDMAKRTTHPLFVIATRRSEEILGPDGNTPQFENISIYNYFVWTHYYSVKKTFLGVGQESFGEVDFSHEGPAFLTWHRYHLLRLEKDMQEMLQEPSFSLPYWNFATGKNVCDICTDDLMGSRSNFDSTLISPNSVFSQWRVVCDSLEDYDTLGTLCNSTEDGPIRRNPAGNVARPMVQRLPEPQDVAQCLEVGLFDTPPFYSNSTNSFRNTVEGYSDPTGKYDPAVRSLHNLAHLFLNGTGGQTHLSPNDPIFVLLHTFTDAVFDEWLRRYNADISTFPLENAPIGHNRQYNMVPFWPPVTNTEMFVTAPDNLGYTYEIQWPSREFSVPEIIAIAVVGALLLVALIFGTASYLIRARRSMDEANQPLLTDQYQCYAEEYEKLQNPNQSVV

SEQ ID NO: 13864 - protein, 43 aa, Homo Sapiens
GGMINWNRLFPPLRQRQNVNYQGGRQSEPAAPPLEVSEEQTNE

SEQ ID NO: 13865 - protein, 309 aa, Homo Sapiens
MCFFFSLQEEFLDKHTLMRVLSSGGKLGSRGEGAQLCCWMLLFSWRVSGGQQTRRLCRRAFCWSPVPSPSCSPSSCLTARSSLCMTFTQSRTTSSLAPVFALFVPFYCSIPRVQVAQILGPLSITNKTLIYILGLQLFTSGSYIWIVAISGLMSGLCYDSKMFQVHQVLCIPSWMAKFFSWTLEPIFSSSEPTSEARIGMGATLDIQRQQRMELLDRQLMFSQFAQGRRQRQQQGGMINWNRLFPPLRQRQNVNYQGGRQSEPAAPPLEVSEEQVARLMEMGFSRGDALEALRASNNDLNVATNFLLQH

SEQ ID NO: 13866 - protein, 344 aa, Homo Sapiens
MFTSTGSSGLYKAPLSKSLLLVPSALSLLLALLLPHCQKLFVYDLHAVKNDFQIWRLICGRIICLDLKDTFCSSLLIYNFRIFERRYGSRKFASFLLGSWVLSALFDFLLIEAMQYFFGITAASNLPSGFLAPVFALFVPFYCSIPRVQVAQILGPLSITNKTLIYILGLQLFTSGSYIWIVAISGLMSGLCYDSKMFQVHQVLCIPSWMAKFFSWTLEPIFSSSEPTSEARIGMGATLDIQRQQRMELLDRQLMFSQFAQGRRQRQQQGGMINWNRLFPPLRQRQNVNYQGGRQSEPAAPPLEVSEEQVARLMEMGFSRGDALEALRASNNDLNVATNFLLQH

SEQ ID NO: 13867 - protein, 204 aa, Homo Sapiens
MFTSTGSSGLYKAPLSKSLLLVPSALSLLLALLLPHCQKLFVYDLHAVKNDFQMSGLCYDSKMFQVHQVLCIPSWMAKFFSWTLEPIFSSSEPTSEARIGMGATLDIQRQQRMELLDRQLMFSQFAQGRRQRQQQGGMINWNRLFPPLRQRQNVNYQGGRQSEPAAPPLEVSEEQVARLMEMGFSRGDALEALRASNNDLNVAT

SEQ ID NO: 13868 - protein, 135 aa, Homo Sapiens
MGTKPRRPPRPHLVSPDKAPLSKSLLLVPSALSLLLALLLPHCQKLFVYDLHAVKNDFQIWRLICGRIICLDLKDTFCSSLLIYNFRIFERRYGSRKFASFLLGSWVLSALFDFLLIEAMQYFFGITAASNLPSG

SEQ ID NO: 13869 - protein, 212 aa, Homo Sapiens
MKLLTLQPPGMLWLMERGGLGKPRGPRHRGLLRVRLGRFISRLLLWEPLGGGQAWGSGEGTQSLPRMGQPRISPWEAVGAPPGRGAHPISPLFPSQMCTPANTPATPPNFPDALTMFSRLKASESFHSGGSGSPMAATATSPPPHFPHAATSSSAASSWPTAASPPGGPQHHQPQPPLWTPTPPSPASDWPPLAPQQATSEPRAHPAMEAER

SEQ ID NO: 13870 - protein, 52 aa, Homo Sapiens
MMCTPANTPATPPNFPDALTMFSRLKASESFHSGGSGSPMAATATSPPPHFP

SEQ ID NO: 13871 - protein, 117 aa, Homo Sapiens
MMCTPANTPATPPNFPDALTMFSRLKASESFHSGGSGSPMAATATSPPPHFPHAATSSSAASSWPTAASPPGGPQHHQPQPPLWTPTPPSPASDWPPLAPQQATSEPRAHPAMEAER

SEQ ID NO: 13872 - protein, 67 aa, Homo Sapiens
MSVNMDELKHQRCCSLQRKGLWETPGLFPPPPSACLLGLPACLPCTWGYPHPLPFPLLTKEKNEFQT

SEQ ID NO: 13873 - protein, 156 aa, Homo Sapiens
MSVNMDELKHQVMINQFVLTAGCAADQAKQLLQAAHWQFEMCTPANTPATPPNFPDALTMFSRLKASESFHSGGSGSPMAATATSPPPHFPHAATSSSAASSWPTAASPPGGPQHHQPQPPLWTPTPPSPASDWPPLAPQQATSEPRAHPAMEAER

SEQ ID NO: 13874 - protein, 94 aa, Homo Sapiens
MSVNMDELKHQVMINQFVLTAGCAADQAKQLLQAAHWQFESSQGHPQPQRSLGTRAAAGPAGAWRVSRGLSSCRQPSAPFSRRPTSPTATITTR

SEQ ID NO: 13875 - protein, 152 aa, Homo Sapiens
MSVNMDELKHQVMINQFVLTAGCAADQAKQLLQAAHWQFETALSAFFQETNIPYSHHHHQMASESFHSGGSGSPMAATATSPPPHFPHAATSSSAASSWPTAASPPGGPQHHQPQPPLWTPTPPSPASDWPPLAPQQATSEPRAHPAMEAER

SEQ ID NO: 13876 - protein, 177 aa, Homo Sapiens
MSVNMDELKHQVMINQFVLTAGCAADQAKQLLQAAHWQFETALSAFFQETNIPYSHHHHQMMCTPANTPATPPNFPDALTMFSRLKASESFHSGGSGSPMAATATSPPPHFPHAATSSSAASSWPTAASPPGGPQHHQPQPPLWTPTPPSPASDWPPLAPQQATSEPRAHPAMEAER

SEQ ID NO: 13877 - protein, 122 aa, Homo Sapiens
MSVNMDELKHQVMINQFVLTAGCAADQAKQLLQAAHWQFEVRGAGAGRGPGPRAECVPRGRRAGADGVDACRLCAPSGPQTRPAFPTAVPGVRIPRARGGRRQPSAPFSRRPTSPTATITTR

SEQ ID NO: 13878 - protein, 117 aa, Homo Sapiens
HNRIPYQSPVSSSESAPGTIMNGHGGGRSQQTLDTPKTTGPPSALPSVSSLPSTTSCTALLPSTSQHTGDLTSSPLSQLSSMPVWRAPLPTSPQPPSPRQRPPSQVPHPQAPACPVA

SEQ ID NO: 13879 - protein, 412 aa, Homo Sapiens
MMTSVSSDHCRGAREKPQISAAQSTQPQKQVVQATAEQMRLAQVIFDKNDSDFEAKVKQLMEVTGKNQDECIVALHDCNGDVNKAINILLEGNSDTTSWETVGCKKKNFAKENSENKENREKKSEKESSRGRGNNNRKGRGGNRGREFRGEENGIDCNQVDKPSDRGKRARGRELASNTHNIAQDLSNKSSYGLKGAWKNSVEEWTTEDWTEDLSETKVFTASSAPAENHILPGQSIDLVALLQKPVPHSQASEANSFETSQQQGFGQALVFTNSQHNNQMAPGTGSSTAVNSCSPQSLSSVLGSGFGELAPPKMANITSSQILDQLKAPSLGQFTTTPSTQQNSTSHPTTTTSWDLKPPTSQSSVLSHLDFKSQPEPSPVLSQLSQRQQHQSQAVTVPPPGLESFPSQAKL

SEQ ID NO: 13880 - protein, 1119 aa, Homo Sapiens
MMTSVSSDHCRGAREKPQISAAQSTQPQKQVVQATAEQMRLAQVIFDKNDSDFEAKVKQLMEVTGKNQDECIVALHDCNGDVNKAINILLEGNSDTTSWETVGCKKKNFAKENSENKENREKKSEKESSRGRGNNNRKGRGGNRGREFRGEENGIDCNQVDKPSDRGKRARGRGFGRGRGRGAGRFSTQGMGTFNPADYSDSTSTDVCGTKLVVWEAAQNGADEGTELASNTHNIAQDLSNKSSYGLKGAWKNSVEEWTTEDWTEDLSETKVFTASSAPAENHILPGQSIDLVALLQKPVPHSQASEANSFETSQQQGFGQALVFTNSQHNNQMAPGTGSSTAVNSCSPQSLSSVLGSGFGELAPPKMANITSSQILDQLKAPSLGQFTTTPSTQQNSTSHPTTTTSWDLKPPTSQSSVLSHLDFKSQPEPSPVLSQLSQRQQHQSQAVTVPPPGLESFPSQAKLRESTPGDSPSTVNKLLQLPSTTIENISVSVHQPQPKHIKLAKRRIPPASKIPASAVEMPGSADVTGLNVQFGALEFGSEPSLSEFGSAPSSENSNQIPISLYSKSLSEPLNTSLSMTSAVQNSTYTTSVITSCSLTSSSLNSASPVAMSSSYDQSSVHNRIPYQSPVSSSESAPGTIMNGHGGGRSQQTLDTPKTTGPPSALPSVSSLPSTTSCTALLPSTSQHTGDLTSSPLSQLSSSLSSHQSSLSAHAALSSSTSHTHASVESASSHQSSATFSTAATSVSSSASSGASLSSSMNTANSLCLGGTPASASSSSSRAAPLVTSGKAPPNLPQGVPPLLHNQYLVGPGGLLPAYPIYGYDELQMLQSRLPVDYYGIPFAAPTALASRDGSLANNPYPGDVTKFGRGDSASPAPATTPAQPQQSQSQTHHTAQQPFVNPALPPGYSYTGLPYYTGMPSAFQYGPTMFVPPASAKQHGVNLSTPTPPFQQASGYGQHGYSTGYDDLTQGTAAGDYSKGGYAGSSQAPNKSAGSGPGKGVSVSSSTTGLPDMTGSVYNKTQTFDKQGFHAGTPPPFSLPSVLGSTGPLASGAAPGYAPPPFLHILPAHQQPHSQLLHHHLPQDAQSGSGQRSQPSSLQPKSQASKPAYGNSPYWTN

SEQ ID NO: 13881 - protein, 1119 aa, Homo Sapiens; identical to SEQ ID NO: 13880

SEQ ID NO: 13882 - protein, 358 aa, Homo Sapiens
MNTANSLCLGGTPASASSSSSRAAPLVTSGKAPPNLPQGVPPLLHNQYLVGPGGLLPAYPIYGYDELQMLQSRLPVDYYGIPFAAPTALASRDGSLANNPYPGDVTKFGRGDSASPAPATTPAQPQQSQSQTHHTAQQPFVNPALPPGYSYTGLPYYTGMPSAFQYGPTMFVPPASAKQHGVNLSTPTPPFQQASGYGQHGYSTGYDDLTQGTAAGDYSKGGYAGSSQAPNKSAGSGPGKGVSVSSSTTGLPDMTGSVYNKTQTFDKQGFHAGTPPPFSLPSVLGSTGPLASGAAPGYAPPPFLHILPAHQQPHSQLLHHHLPQDAQSGSGQRSQPSSLQPKSQASKPAYGNSPYWTN

SEQ ID NO: 13883 - protein, 176 aa, Homo Sapiens
MRLAQVIFDKNDSDFEAKVKQLMEVTGKNQDECIVALHDCNGDVNKAINILLEGNSDTTSWETVGCKKKNFAKENSENKENREKKSEKESSRGRGNNNRKGRGGNRGREFRGEENGIDCNQVDKPSDRGKRARGRELASNTHNIAQDLSNKSSYGLKGAWKNSVEEWTTEDWTEDH

SEQ ID NO: 13884 - protein, 278 aa, Homo Sapiens
  misc_feature (1)..(1): Xaa can be any naturally occurring amino acid
XEKESSRGRGNNNRKGRGGNRGREFRGEENGIDCNQVDKPSDRGKRARGRGFGRGRGRGAGRFSTQGMGTFNPADYSDSTSTDVCGTKLVVWEAAQNGADEGTGAWKNSVEEWTTEDWTEDLSETKVFTASSAPAENHILPGQSIDLVALLQKPVPHSQASEANSFETSQQQGFGQALVFTNSQHNNQMAPGTGSSTAVNSCSPQSLSSVLGSGFGELAPPKMANITSSQILDQLKAPSLGQFTTTPSTQQNSTSHPTTTTSWDLKPPTSQSSVLSHL

SEQ ID NO: 13885 - protein, 270 aa, Homo Sapiens
MASRGVVGIFFLSAVPLVCLELRRGIPDIGIKDFLLLCGRILLLLALLTLTISVTTSWLNSFKSPQVYLKEEEEKNEKRQKLVRKKQQEAQGEKASRYIENVLKPHQEMKLRKLEERFYQMTGEAWKLSSGHKLGGDEGTSQTSFETSNREAAKSQNLPKPLTEFPSPAEQPTCKEIPDLPEEPSQTAEEVVTVALRCPSGNVLRRRFLKSYSSQVLFDWMTRIGYHISLYSLSTSFPRRPLAVEGGQSLEDIGITVDTVLILEEKEQTN

SEQ ID NO: 13886 - protein, 229 aa, Homo Sapiens
MASRGVVGIFFLSAVPLVCLELRRGIPDIGIKDFLLLCGRILLLLALLTLTISVTTSWLNSFKSPQVYLKEEEEKNEKRQKLVRKKQQEAQGEKGDEGTSQTSFETSNREAAKSQNLPKPLTEFPSPAEQPTCKEIPDLPEEPSQTAEEVVTVALRCPSGNVLRRRFLKSYSSQVLFDWMTRIGYHISLYSLSTSFPRRPLAVEGGQSLEDIGITVDTVLILEEKEQTN

SEQ ID NO: 13887 - protein, 42 aa, Homo Sapiens
MASRGVVGIFFLSAVPLVCLELRRGIPDIGKCDFFPSTVTAG

SEQ ID NO: 13888 - protein, 233 aa, Homo Sapiens
MASRGVVGIFFLSAVPLVCLELRRGIPDIVYLKEEEEKNEKRQKLVRKKQQEAQGEKASRYIENVLKPHQEMKLRKLEERFYQMTGEAWKLSSGHKLGGDEGTSQTSFETSNREAAKSQNLPKPLTEFPSPAEQPTCKEIPDLPEEPSQTAEEVVTVALRCPSGNVLRRRFLKSYSSQVLFDWMTRIGYHISLYSLSTSFPRRPLAVEGGQSLEDIGITVDTVLILEEKEQTN

SEQ ID NO: 13889 - protein, 248 aa, Homo Sapiens
MCQREKRWQLGVLTQTVGPWPRPVAYLSKQLDGVFKGWPPCLRALAATALLVQEADKLTLGQNRNIKAPHAVVTLMNTKGHHWLMSARLTKYQSLLCENPRITIEVCNTLNPATLFPVSESPVEHDCVEVLDSVYSSRPDLRDQPWASVDWELYVDGSSFINPQGERFAGYAVVTLDTVVEARSLPQGTSAQKAELIALIRALELSEGIKDFLLLCGRILLLLALLTLTISVTTSWLNSFKSPQVYLK

SEQ ID NO: 13890 - protein, 310 aa, Homo Sapiens
MLYSGTWRTVGIRCPRKKAQICQQQECCIERPPLRLRGFGAALTTTPRLHRPCPPTSGADFTSRNLFPPGIKDFLLLCGRILLLLALLTLTISVTTSWLNSFKSPQVYLKEEEEKNEKRQKLVRKKQQEAQGEKASRYIENVLKPHQEMKLRKLEERFYQMTGEAWKLSSGHKLGGDEGTSQTSFETSNREAAKSQNLPKPLTEFPSPAEQPTCKEIPDLPEEPSQTAEEVVTVALRCPSGNVLRRRFLKSYSSQVLFDWMTRIGYHISLYSLSTSFPRRPLAVEGGQSLEDIGITVDTVLILEEKEQTN

SEQ ID NO: 13891 - protein, 94 aa, Homo Sapiens
  misc_feature (1)..(1): Xaa can be any naturally occurring amino acid
XIKDFLLLCGRILLLLALLTLTISVTTSWLNSFKSPQVYLKEEEEKNEKRQKLVRKKQQEAQGEKASRYIENVLKPHQEMKLRKLEERFYQMTG

SEQ ID NO: 13892 - protein, 138 aa, Homo Sapiens
MTWRQAVLLSCFSAVVLLSMLREGTSVSVGTMQMAGEEASEDAKQKIFMQESDASNFLKRRGKRSPKSRDEVNVENRQKLRVDELRREYYEEQRNEFENFVEEQNDEQEERSREAVEQWRQWHYDGLHPSYLYNRHHT

SEQ ID NO: 13893 - protein, 116 aa, Homo Sapiens
MTWRQAVLLSCFSAVVLLSNAKQKIFMQESDASNFLKRRGKRSPKSRDEVNVENRQKLRVDELRREYYEEQRNEFENFVEEQNDEQEERSREAVEQWRQWHYDGLHPSYLYNRHHT

SEQ ID NO: 13894 - protein, 124 aa, Homo Sapiens
MRQAGRAALLAALLLLVQLCPGSSQRSPEAAGVQDPSLRWSPGARNQGGGARALLLLLAERFPRRAGPGRLGLGTAGERPRRDNPSLSIDLTFHLLRTLLELARTQSQRERAEQNRIIFDSVGK

SEQ ID NO: 13895 - protein, 112 aa, Homo Sapiens
MTRCALLLLMVLMLGRVLVVPVTPIPTFQLRPQNSPQTTPRPAASESPSAAPTWPWAAQSHCSPTRHPGSRIVLSLDVPIGLLQILLEQARARAAREQATTNARILARVGHC

SEQ ID NO: 13896 - protein, 161 aa, Homo Sapiens
MLMPVHFLLLLLLLLGGPRTGLPHKFYKAKPIFSCLNTALSEAEKGQWEDASLLSKRSFHYLRSRDASSGEEEEGKEKKTFPISGARGGARGTRYRYVSQAQPRGKPRQDTAKSPHRTKFTLSLDVPTNIMNLLFNIAKAKNLRAQAAANAHLMAQIGRKK

SEQ ID NO: 13897 - protein, 1516 aa, Homo Sapiens
MAPAKATNVVRLLLGSTALWLSQLGSGTVAASKSVTAHLAAKWPETPLLLEASEFMAEESNEKFWQFLETVQELAIYKQTESDYSYYNLILKKAGQFLDNLHINLLKFAFSIRAYSPAIQMFQQIAADEPPPDGCNAFVVIHKKHTCKINEIKKLLKKAASRTRPYLFKGDHKFPTNKENLPVVILYAEMGTRTFSAFHKVLSEKAQNEEILYVLRHYIQKPSSRKMYLSGYGVELAIKSTEYKALDDTQVKTVTNTTVEDETETNEVQGFLFGKLKEIYSDLRDNLTAFQKYLIESNKQMMPLKVWELQDLSFQAASQIMSAPVYDSIKLMKDISQNFPIKARSLTRIAVNQHMREEIKENQKDLQVRFKIQPGDARLFINGLRVDMDVYDAFSILDMLKLEGKMMNGLRNLGINGEDMSKFLKLNSHIWEYTYVLDIRHSSIMWINDLENDDLYITWPTSCQKLLKPVFPGSVPSIRRNFHNLVLFIDPAQEYTLDFIKLADVFYSHEVPLRIGFVFILNTDDEVDGANDAGVALWRAFNYIAEEFDISEAFISIVHMYQKVKKDQNILTVDNVKSVLQNTFPHANIWDILGIHSKYDEERKAGASFYKMTGLGPLPQALYNGEPFKHEEMNIKELKMAVLQRMMDASVYLQREVFLGTLNDRTNAIDFLMDRNNVVPRINTLILRTNQQYLNLISTSVTADVEDFSTFFFLDSQDKSAVIAKNMYYLTQDDESIISAVTLWIIADFDKPSGRKLLFNALKHMKTSVHSRLGIIYNPTSKINEENTAISRGILAAFLTQKNMFLRSFLGQLAKEEIATAIYSGDKIKTFLIEGMDKNAFEKKYNTVGVNIFRTHQLFCQDVLKLRPGEMGIVSNGRFLGPLDEDFYAEDFYLLEKITFSNLGEKIKGIVENMGINANNMSDFIMKVDALMSSVPKRASRYDVTFLRENHSVIKTNPQENDMFFNVIAIVDPLTREAQKMAQLLVVLGKIINMKIKLFMNCRGRLSEAPLESFYRFVLEPELMSGANDVSSLGPVAKFLDIPESPLLILNMITPEGWLVETVHSNCDLDNIHLKDTEKTVTAEYELEYLLLEGQCFDKVTEQPPRGLQFTLGTKNKPAVVDTIVMAHHGYFQLKANPGAWILRLHQGKSEDIYQIVGHEGTDSQADLEDIIVVLNSFKSKILKVKVKKETDKIKEDILTDEDEKTKGLWDSIKSFTVSLHKENKKEKDVLNIFSVASGHLYERFLRIMMLSVLRNTKTPVKFWLLKNYLSPTFKEVIPHMAKEYGFRYELVQYRWPRWLRQQTERQRIIWGYKILFLDVLFPLAVDKIIFVDADQIVRHDLKELRDFDLDGAPYGYTPFCDSRREMDGYRFWKTGYWASHLLRRKYHISALYVVDLKKFRRIGAGDRLRSQYQALSQDPNSLSNLDQDLPNNMIYQVAIKSLPQDWLWCETWCDDESKQRAKTIDLCNNPKTKESKLKAAARIVPEWVEYDAEIRQLLDHLENKKQDTILTHDEL

SEQ ID NO: 13898 - protein, 278 aa, Homo Sapiens
MAPAKATNVVRLLLGSTALWLSQLGSGTVAASKSVTAHLAAKWPETPLLLEASEFMAEESNEKFWQFLETVQELAIYKQTESDYSYYNLILKKAGQFLDNLHINLLKFAFSIRAYSPAIQMFQQIAADEPPPDGCNAFVVIHKKHTCKINEIKKLLKKAASRTRPYLFKGDHKFPTNKENLPVVILYAEMGTRTFSAFHKVLSEKAQNEEILYVLRHYIQKPSSRKMYLSGYGVELAIKSTEYKALDDTQVKTVTNTTVEDETETNEVQGFLFGKLKS

SEQ ID NO: 13899 - protein, 280 aa, Homo Sapiens
MAPAKATNVVRLLLGSTALWLSQLGSGTVAASKSVTAHLAAKWPETPLLLEASEFMAEESNEKFWQFLETVQELAIYKQTESDYSYYNLILKKAGQFLDNLHINLLKFAFSIRAYSPAIQMFQQIAADEPPPDGCNAFVVIHKKHTCKINEIKKLLKKAASRTRPYLFKGDHKFPTNKENLPVVILYAEMGTRTFSAFHKVLSEKAQNEEILYVLRHYIQKPSSRKMYLSGYGVELAIKSTEYKALDDTQVKTVTNTTVEDETETNEVQGFLFGKLKLVY

SEQ ID NO: 13900 - protein, 372 aa, Homo Sapiens
MAPAKATNVVRLLLGSTALWLSQLGSGTVAASKSVTAHLAAKWPETPLLLEASEFMAEESNEKFWQFLETVQELAIYKQTESDYSYYNLILKKAGQFLDNLHINLLKFAFSIRAYSPAIQMFQQIAADEPPPDGCNAFVVIHKKHTCKINEIKKLLKKAASRTRPYLFKGDHKFPTNKENLPVVILYAEMGTRTFSAFHKVLSEKAQNEEILYVLRHYIQKPSSRKMYLSGYGVELAIKSTEYKALDDTQVKTVTNTTVEDETETNEVQGFLFGKLKEIYSDLRDNLTAFQKYLIESNKQMMPLKVWELQDLSFQAASQIMSAPVYDSIKLMKDISQNFPIKARLRMNILICLFQSTLNVKNLRSRHLYNKT

SEQ ID NO: 13901 - protein, 280 aa, Homo Sapiens [sequence omitted]

SEQ ID NO: 13902 - protein, 278 aa, Homo Sapiens; identical to SEQ ID NO: 13898

SEQ ID NO: 13903 - protein, 530 aa, Homo Sapiens
MARAGWTSPVPLCVCLLLTCGFAEAGKLLVVPMDGSHWFTMQSVVEKLILRGHEVVVVMPEVSWQLERSLNCTVKTYSTSYTLEDQNREFMVFAHAQWKAQAQSIFSLLMSSSSGFLDLFFSHCRSLFNDRKLVEYLKESSFDAVFLDPFDTCGLIVAKYFSLPSVVFTRGIFCHHLEEGAQCPAPLSYVPNDLLGFSDAMTFKERVWNHIVHLEDHLFCQYLFRNALEIASEILQTPVTAYDLYSHTSIWLLRTDFVLDYPKPVMPNMIFIGGINCHQGKPLPMEFEAYINASGEHGIVVFSLGSMVSEIPEKKAMAIADALGKIPQTVLWRYTGTRPSNLANNTILVKWLPQNDLLGHPMTRAFITHAGSHGVYESICNGVPMVMMPLFGDQMDNAKRMETKGAGVTLNVLEMTSEDLENALKAVINDKSYKENIMRLSSLHKDRPVEPLDLAVFWVEFVMRHKGAPHLRPAAHDLTWYQYHSLDVIGFLLAVVLTVAFITFKCCAYGYRKCLGKKGRVKKAHKSKTH

SEQ ID NO: 13904 - protein, 441 aa, Homo Sapiens
MARAGWTSPVPLCVCLLLTCGFAEAGKLLVVPMDGSHWFTMQSVVEKLILRGHEVVVVMPEVSWQLERSLNCTVKTYSTSYTLEDQNREFMVFAHAQWKAQAQSIFSLLMSSSSGFLDLFFSHCRSLFNDRKLVEYLKESSFDAVFLDPFDTCGLIVAKYFSLPSVVFTRGIFCHHLEEGAQCPAPLSYVPNDLLGFSDAMTFKERVWNHIVHLEDHLFCQYLFRNALEIASEILQTPVTAYDLYSHTSIWLLRTDFVLDYPKPVMPNMIFIGGINCHQGKPLPMEFEAYINASGEHGIVVFSLGSMVSEIPEKKAMAIADALGKIPQTVLWRYTGTRPSNLANNTILVKWLPQNDLLGHPMTRAFITHAGSHGVYESICNGVPMVMMPLFGDQMDNAKRMETKGAGVTLNVLEMTSEDLENALKAVINDKRKKQQSGRQM

SEQ ID NO: 13905 - protein, 158 aa, Homo Sapiens
MLNNLLLFSLQISLIGTTLGGNVLIWPMEGSHWLNVKIIIDELIKKEHNVTVLVASGALFITPTSNPSLTFEIYKVPFGKERIEGVIKDFVLTWLENRPSPSTIWRFYQEMAKVIKDFHMVSQEICDGVLKNQQLMAKLKKSKFEVLVSDPVFPCGDI

SEQ ID NO: 13906 - protein, 693 aa, Homo Sapiens
MLNNLLLFSLQISLIGTTLGGNVLIWPMEGSHWLNVKIIIDELIKKEHNVTVLVASGALFITPTSNPSLTFEIYKVPFGKERIEGVIKDFVLTWLENRPSPSTIWRFYQEMAKVIKDFHMVSQEICDGVLKNQQLMAKLKKSKFEVLVSDPVFPCGDIVALKLGIPFMYSLRFSPASTVEKHCGKVPYPPSYVPAVLSELTDQMSFTDRIRNFISYHLQDYMFETLWKSWDSYYSKALDGSHWLNIKIILEELIQRNHNVTVLASSATLFINSNPDSPVNFEVIPVSYKKSNIDSLIEHMIMLWIDHRPTPLTIWAFYKELGKLLDTFFQINIQLCDGVLKNPKLMARLQKGGFDVLVADPVTICGDLVALKLGIPFMYTLRFSPASTVERHCGKIPAPVSYVPAALSELTDQMTFGERIKNTISYSLQDYIFQSYWGEWNSYYSKILGRPTTLCETMGKAEIWLIRTYWDFEFPRPYLPNFEFVGGLHCKPAKPLPKVLWRYKGKKPATLGNNTQLFDWIPQNDLLGHPKTKAFITHGGTNGIYEAIYHGVPMVGVPMFADQPDNIAHMKAKGAAVEVNLNTMTSVDLLSALRTVINEPSYKENAMRLSRIHHDQPVKPLDRAVFWIEFVMRHKGAKHLRVAAHDLTWFQYHSLDVIGFLLVCVTTAIFLVIQCCLFSCQKFGKIGKKKKRE

SEQ ID NO: 13907 - protein, 527 aa, Homo Sapiens
MLNNLLLFSLQISLIGTTLGGNVLIWPMEGSHWLNVKIIIDELIKKEHNVTVLVASGALFITPTSNPSLTFEIYKVPFGKERIEGVIKDFVLTWLENRPSPSTIWRFYQEMAKVIKDFHMVSQEICDGVLKNQQLMAKLKKSKFEVLVSDPVFPCGDIVALKLGIPFMYSLRFSPASTVEKHCGKVPYPPSYVPAVLSELTDQMSFTDRIRNFISYHLQDYMFETLWKSWDSYYSKALGGLLLCCPGWSAVADLGSLQPLLPGFKRFSRLSLHCSWDYRLPAGRPTTLCETMGKAEIWLIRTYWDFEFPRPYLPNFEFVGGLHCKPAKPLPKVLWRYKGKKPATLGNNTQLFDWIPQNDLLGHPKTKAFITHGGTNGIYEAIYHGVPMVGVPMFADQPDNIAHMKAKGAAVEVNLNTMTSVDLLSALRTVINEPSYKENAMRLSRIHHDQPVKPLDRAVFWIEFVMRHKGAKHLRVAAHDLTWFQYHSLDVIGFLLVCVTTAIFLVIQCCLFSCQKFGKIGKKKKRE

SEQ ID NO: 13908 - protein, 483 aa, Homo Sapiens
MLNNLLLFSLQISLIGTTLGGNVLIWPMEGSHWLNVKIIIDELIKKEHNVTVLVASGALFITPTSNPSLTFEIYKVPFGKERIEGVIKDFVLTWLENRPSPSTIWRFYQEMAKVIKDFHMVSQEICDGVLKNQQLMAKLKKSKFEVLVSDPVFPCGDIVALKLGIPFMYSLRFSPASTVEKHCGKVPYPPSYVPAVLSELTDQMSFTDRIRNFISYHLQDYMFETLWKSWDSYYSKALGRPTTLCETMGKAEIWLIRTYWDFEFPRPYLPNFEFVGGLHCKPAKPLPKVLWRYKGKKPATLGNNTQLFDWIPQNDLLGHPKTKAFITHGGTNGIYEAIYHGVPMVGVPMFADQPDNIAHMKAKGAAVEVNLNTMTSVDLLSALRTVINEPSYKENAMRLSRIHHDQPVKPLDRAVFWIEFVMRHKGAKHLRVAAHDLTWFQYHSLDVIGFLLVCVTTAIFLVIQCCLFSCQKFGKIGKKKKRE

SEQ ID NO: 13909 - protein, 527 aa, Homo Sapiens
MLNNLLLFSLQISLIGTTLGGNVLIWPMEGSHWLNVKIIIDELIKKEHNVTVLVASGALFITPTSNPSLTFEIYKVPFGKERIEGVIKDFVLTWLENRPSPSTIWRFYQEMAKVIKDFHMVSQEICDGVLKNQQLMAKLKKSKFEVLVSDPVFPCGDIVALKLGIPFMYSLRFSPASTVEKHCGKVPYPPSYVPAVLSELTDQMSFTDRIRNFISYHLQDYMFETLWKSWDSYYSKALGRPTTLCETMGKAEIWLIRTYWDFEFPRPYLPNFEFVGGLHCKPAKPLPKEMEEFIQSSGKNGVVVFSLGSMVKNLTEEKANLIASALAQIPQKVLWRYKGKKPATLGNNTQLFDWIPQNDLLGHPKTKAFITHGGTNGIYEAIYHGVPMVGVPMFADQPDNIAHMKAKGAAVEVNLNTMTSVDLLSALRTVINEPSYKENAMRLSRIHHDQPVKPLDRAVFWIEFVMRHKGAKHLRVAAHDLTWFQYHSLDVIGFLLVCVTTAIFLVIQCCLFSCQKFGKIGKKKKRE

SEQ ID NO: 13910 - protein, 529 aa, Homo Sapiens
MTLKWTSVLLLIHLSCYFSSGSCGKVLVWAAEYSHWMNMKTILKELVQRGHEVTVLASSASILFDPNDASTLKFEVYPTSLTKTEFENIIMQQVKRWSDIRKDSFWLYFSQEQEILWELYDIFRNFCKDVVSNKKVMKKLQESRFDIVFADAVFPCGELLAALLNIRFVYSLRFTPGYTIERHSGGLIFPPSYIPIVMSKLSDQMTFMERVKNMIYVLYFDFWFQMSDMKKWDQFYSEVLGRPTTLFETMGKADIWLMRNSWSFQFPHPFLPNVDFVGGFHCKPAKPLPKEMEEFVQSSGENGVVVFSLGSVISNMTAERANVIATALAKIPQKVLWRFDGNKPDALGLNTRLYKWIPQNDLLGHPKTRAFITHGGANGIYEAIYHGIPMVGIPLFFDQPDNIAHMKAKGAAVRLDFNTMSSTDLLNALKTVINDPLYKENIMKLSRIQHDQPVKPLDRAVFWIEFVMPHKGAKHLRVAAHDLTWFQYHSLDVIGFLLACVATVIFIITKFCLFCFWKFARKGKKGKRD

SEQ ID NO: 13911 - protein, 529 aa, Homo Sapiens
MALKWTSVLLLIHLGCYFSSGSCGKVLVWTGEYSHWMNMKTILKELVQRGHEVTVLASSASILFDPNDAFTLKLEVYPTSLTKTEFENIIMQQVKRWSDIQKDSFWLYFSQEQEILWEFHDIFRNFCKDVVSNKKVMKKLQESRFDIIFADAFFPCGELLAALLNIPFVYSLCFTPGYTIERHSGGLIFPPSYIPVVMSKLSDQMTFMERVKNMIYVLYFDFWFQMCDMKKWDQFYSEVLGRPTTLFETMGKADIWLMRNSWSFQFPHPFLPNIDFVGGLHCKPAKPLPKEMEEFVQSSGENGVVVFSLGSVISNMTAERANVIATALAKIPQKVLWRFDGNKPDALGLNTRLYKWIPQNDLLGLPKTRAFITHGGANGIYEAIYHGIPMVGIPLFWDQPDNIAHMKAKGAAVRLDFHTMSSTDLLNALKTVINDPSYKENVMKLSIIQHDQPVKPLHRAVFWIEFVMCHKGAKHLRVAARDLTWFQYHSLDVIGFLLACVATVIFVVTKFCLFCFWKFARKGKKGKRD

SEQ ID NO: 13912 - protein, 335 aa, Homo Sapiens
MALKWTSVLLLIHLGCYFSSGSCGKVLVWTGEYSHWMNMKTILKELVQRGHEVTVLASSASILFDPNDAFTLKLEVYPTSLTKTEFENIIMQQVKRWSDIQKDSFWLYFSQEQEILWEFHDIFRNFCKDVVSNKKVMKKLQESRFDIIFADAFFPCGELLAALLNIPFVYSLCFTPGYTIERHSGGLIFPPSYIPVVMSKLSDQMTFMERVKNMIYVLYFDFWFQMCDMKKWDQFYSEVLGRPTTLFETMGKADIWLMRNSWSFQFPHPFLPNIDFVGGLHCKPAKPLPKEMEEFVQSSGENGVVVFSLGSVISNMTAERANVIATALAKIPQKI

SEQ ID NO: 13913 - protein, 54 aa, Homo Sapiens
MSMKWTSALLLIQLSCYFSSGSCGKVLVWPTEFSHWMNIKTILDELVQRGHEVT

SEQ ID NO: 13914 - protein, 528 aa, Homo Sapiens
MSMKWTSALLLIQLSCYFSSGSCGKVLVWPTEFSHWMNIKTILDELVQRGHEVTVLASSASISFDPNSPSTLKFEVYPVSLTKTEFEDIIKQLVKRWAELPKDTFWSYFSQVQEIMWTFNDILRKFCKDIVSNKKLMKKLQESRFDVVLADAVFPFGELLAELLKIPFVYSLRFSPGYAIEKHSGGLLFPPSYVPVVMSELSDQMTFIERVKNMIYVLYFEFWFQIFDMKKWDQFYSEVLGRPTTLSETMAKADIWLIRNYWDFQFPHPLLPNVEFVGGLHCKPAKPLPKEMEEFVQSSGENGVVVFSLGSMVSNTSEERANVIASALAKIPQKVLWRFDGNKPDTLGLNTRLYKWIPQNDLLGHPKTRAFITHGGANGIYEAIYHGIPMVGVPLFADQPDNIAHMKAKGAAVSLDFHTMSSTDLLNALKTVINDPLYKENAMKLSRIHHDQPVKPLDRAVFWIEFVMRHKGAKHLRVAAHDLTWFQYHSLDVTGFLLACVATVIFIITKCLFCVWKFVRTGKKGKRD

SEQ ID NO: 13915 - protein, 369 aa, Homo Sapiens
MSMKWTSALLLIQLSCYFSSGSCGKVLVWPTEFSHWMNIKTILDELVQRGHEVTVLASSASISFDPNSPSTLKFEVYPVSLTKTEFEDIIKQLVKRWAELPKDTFWSYFSQVQEIMWTFNDILRKFCKDIVSNKKLMKKLQESRFDVVLADAVFPFGELLAELLKIPFVYSLRFSPGYAIEKHSGGLLFPPSYVPVVMSELSDQMTFIERVKNMIYVLYFEFWFQIFDMKKWDQFYSEVLGRPTTLSETMAKADIWLIRNYWDFQFPHPLLPNVEFVGGLHCKPAKPLPKEMEEFVQSSGENGVVVFSLGSMVSNTSEERANVIASALAKIPQKVLWRFDGNKPDTLGLNTRLYKWIPQNDLLDIKRML

SEQ ID NO: 13916 - protein, 369 aa, Homo Sapiens [sequence omitted]

SEQ ID NO: 13917 - protein, 156 aa, Homo Sapiens
MGKADVWLIRNSWNFQFPYPLLPNVDFVGGLHCKPAKPLPKEMEDFVQSSGENGVVVFSLGSMVSNMTEERANVIASALAQIPQKVLWRFDGNKPDTLGLNTRLYKWIPQNDLLGHPKTRAFITHGGANGIYEAIYHGIPMVGIPLFADQPDNIAH

SEQ ID NO: 13918 - protein, 529 aa, Homo Sapiens
MSVKWTSVILLIQLSFCFSSGNCGKVLVWAAEYSHWMNIKTILDELIQRGHEVTVLASSASILFDPNNSSALKIEIYPTSLTKTELENFIMQQIKRWSDLPKDTFWLYFSQVQEIMSIFGDITRKFCKDVVSNKKFMKKVQESRFDVIFADAIFPCSELLAELFNIPFVYSLSFSPGYTFEKHSGGFIFPPSYVPVVMSELTDQMTFMERVKNMIYVLYFDFWFEIFDMKKWDQFYSEVLGRPTTLSETMGKADVWLIRNSWNFQFPYPLLPNVDFVGGLHCKPAKPLPKEMEDFVQSSGENGVVVFSLGSMVSNMTEERANVIASALAQIPQKVLWRFDGNKPDTLGLNTRLYKWIPQNDLLGHPKTRAFITHGGANGIYEAIYHGIPMVGIPLFADQPDNIAHMKARGAAVRVDFNTMSSTDLLNALKRVINDPSYKENVMKLSRIQHDQPVKPLDRAVFWIEFVMRHKGAKHLRVAAHDLTWFQYHSLDVIGFLLVCVATVIFIVTKCCLFCFWKFARKAKKGKND

SEQ ID NO: 13919 - protein, 369 aa, Homo Sapiens
MSVKWTSVILLIQLSFCFSSGNCGKVLVWAAEYSHWMNIKTILDELIQRGHEVTVLASSASILFDPNNSSALKIEIYPTSLTKTELENFIMQQIKRWSDLPKDTFWLYFSQVQEIMSIFGDITRKFCKDVVSNKKFMKKVQESRFDVIFADAIFPCSELLAELFNIPFVYSLSFSPGYTFEKHSGGFIFPPSYVPVVMSELTDQMTFMERVKNMIYVLYFDFWFEIFDMKKWDQFYSEVLGRPTTLSETMGKADVWLIRNSWNFQFPYPLLPNVDFVGGLHCKPAKPLPKEMEDFVQSSGENGVVVFSLGSMVSNMTEERANVIASALAQIPQKVLWRFDGNKPDTLGLNTRLYKWIPQNDLLDIKRML

SEQ ID NO: 13920 - protein, 335 aa, Homo Sapiens
MSVKWTSVILLIQLSFCFSSGNCGKVLVWAAEYSHWMNIKTILDELIQRGHEVTVLASSASILFDPNNSSALKIEIYPTSLTKTELENFIMQQIKRWSDLPKDTFWLYFSQVQEIMSIFGDITRKFCKDVVSNKKFMKKVQESRFDVIFADAIFPCSELLAELFNIPFVYSLSFSPGYTFEKHSGGFIFPPSYVPVVMSELTDQMTFMERVKNMIYVLYFDFWFEIFDMKKWDQFYSEVLGRPTTLSETMGKADVWLIRNSWNFQFPYPLLPNVDFVGGLHCKPAKPLPKEMEDFVQSSGENGVVVFSLGSMVSNMTEERANVIASALAQIPQKI

SEQ ID NO: 13921 - protein, 252 aa, Homo Sapiens
MLHQSGKFLIPDIKEEEKSYQVIRWFSPEDHQKRIKKHFDSYIETALDGRKESEALVKLMEIFGTQCSYLLSRKDIMDSLKNENYDLVFVEAFDFCSFLIAEKLVKPFVAILPTTFGSLDFGLPSPLSYVPVFPSLLTDHMDFWGRVKNFLMFFSFSRSQWDMQSTFDNTIKEHFPEGSRPVLSHLLLKAELWFVNSDFAFDFARPLLPNTVYIGGLMEKPIKPVPQNGQPALFTTPSLFSSGVYPEPLRWL

SEQ ID NO: 13922 - protein, 252 aa, Homo Sapiens; identical to SEQ ID NO: 13921

SEQ ID NO: 13923 - protein, 402 aa, Homo Sapiens
MVGQRVLLLVAFLLSGVLLSEAAKILTISTLDIKEEEKSYQVIRWFSPEDHQKRIKKHFDSYIETALDGRKESEALVKLMEIFGTQCSYLLSRKDIMDSLKNENYDLVFVEAFDFCSFLIAEKLVKPFVAILPTTFGSLDFGLPSPLSYVPVFPSLLTDHMDFWGRVKNFLMFFSFSRSQWDMQSTFDNTIKEHFPEGSRPVLSHLLLKAELWFVNSDFAFDFARPLLPNTVYIGGLMEKPIKPVPQDLDNFIANFGDAGFVLVAFGSMLNTHQSQEVLKKMHNAFAHLPQGVIWTCQSSHWPRDVHLATNVKIVDWLPQSDLLAHPSIRLFVTHGGQNSVMEAIRHGVPMVGLPVNGDQHGNMVRVVAKNYGVSIRLNQVTADTLTLTMKQVIEDKRYVAL

SEQ ID NO: 13924 - protein, 57 aa, Homo Sapiens
MVGQRVLLLVAFLLSGVLLSEAAKILTISTLGECLAGEFPDRRVPDPRTARAPANGD

SEQ ID NO: 13925 - protein, 523 aa, Homo Sapiens
MVGQRVLLLVAFLLSGVLLSEAAKILTISTLGGSHYLLLDRVSQILQEHGHNVTMLHQSGKFLIPDIKEEEKSYQVIRWFSPEDHQKRIKKHFDSYIETALDGRKESEALVKLMEIFGTQCSYLLSRKDIMDSLKNENYDLVFVEAFDFCSFLIAEKLVKPFVAILPTTFGSLDFGLPSPLSYVPVFPSLLTDHMDFWGRVKNFLMFFSFSRSQWDMQSTFDNTIKEHFPEGSRPVLSHLLLKAELWFVNSDFAFDFARPLLPNTVYIGGLMEKPIKPVPQDLDNFIANFGDAGFVLVAFGSMLNTHQSQEVLKKMHNAFAHLPQGVIWTCQSSHWPRDVHLATNVKIVDWLPQSDLLAHPSIRLFVTHGGQNSVMEAIRHGVPMVGLPVNGDQHGNMVRVVAKNYGVSIRLNQVTADTLTLTMKQVIEDKRYKSAVVAASVILHSQPLSPAQRLVGWIDHILQTGGATHLKPYAFQQPWHEQYLIDVFVFLLGLTLGTMWLCGKLLGVVARWLRGARKVKKT

SEQ ID NO: 13926 - protein, 436 aa, Homo Sapiens
MVGQRVLLLVAFLLSGVLLSEAAKILTISTLGGSHYLLLDRVSQILQEHGHNVTMLHQSGKFLIPDIKEEEKSYQVIRWFSPEDHQKRIKKHFDSYIETALDGRKESEALVKLMEIFGTQCSYLLSRKDIMDSLKNENYDLVFVEAFDFCSFLIAEKLVKPFVAILPTTFGSLDFGLPSPLSYVPVFPSLLTDHMDFWGRVKNFLMFFSFSRSQWDMQSTFDNTIKEHFPEGSRPVLSHLLLKAELWFVNSDFAFDFARPLLPNTVYIGGLMEKPIKPVPQDLDNFIANFGDAGFVLVAFGSMLNTHQSQEVLKKMHNAFAHLPQGVIWTCQSSHWPRDVHLATNVKIVDWLPQSDLLAHPSIRLFVTHGGQNSVMEAIRHGVPMVGLPVNGDQHGNMVRVVAKNYGVSIRLNQVTADTLTLTMKQVIEDKRYVAL

SEQ ID NO: 13927 - protein, 489 aa, Homo Sapiens
MAGQRVLLLVGFLLPGVLLSEAAKILTISTVDFKKEEKSYQVISWLAPEDHQREFKKSFDFFLEETLGGRGKFENLLNVLEYLALQCSHFLNRKDIMDSLKNENFDMVIVETFDYCPFLIAEKLGKPFVAILSTSFGSLEFGLPIPLSYVPVFRSLLTDHMDFWGRVKNFLMFFSFCRRQQHMQSTFDNTIKEHFTEGSRPVLSHLLLKAELWFINSDFAFDFARPLLPNTVYVGGLMEKPIKPVPQDLENFIAKFGDSGFVLVTLGSMVNTCQNPEIFKEMNNAFAHLPQGVIWKCQCSHWPKDVHLAANVKIVDWLPQSDLLAHPSIRLFVTHGGQNSIMEAIQHGVPMVGIPLFGDQPENMVRVEAKKFGVSIQLKKLKAETLALKMKQIMEDKRYKSAAVAASVILRSHPLSPTQRLVGWIDHVLQTGGATHLKPYVFQQPWHEQYLLDVFVFLLGLTLGTLWLCGKLLGMAVWWLRGARKVKET

SEQ ID NO: 13928 - protein, 138 aa, Homo Sapiens
MAGQRVLLLVGFLLPGVLLSEAAKILTISTVGGSHYLLMDRVSQILQDHGHNVTMLNHKRGPFMPDFKKEEKSYQVISWLAPEDHQREFKKSFDFFLEETLGGRGKFENLLNVLEYLALQCSHFLNRKDIMDSLKNEN

SEQ ID NO: 13929 - protein, 523 aa, Homo Sapiens
MAGQRVLLLVGFLLPGVLLSEAAKILTISTVGGSHYLLMDRVSQILQDHGHNVTMLNHKRGPFMPDFKKEEKSYQVISWLAPEDHQREFKKSFDFFLEETLGGRGKFENLLNVLEYLALQCSHFLNRKDIMDSLKNENFDMVIVETFDYCPFLIAEKLGKPFVAILSTSFGSLEFGLPIPLSYVPVFRSLLTDHMDFWGRVKNFLMFFSFCRRQQHMQSTFDNTIKEHFTEGSRPVLSHLLLKAELWFINSDFAFDFARPLLPNTVYVGGLMEKPIKPVPQDLENFIAKFGDSGFVLVTLGSMVNTCQNPEIFKEMNNAFAHLPQGVIWKCQCSHWPKDVHLAANVKIVDWLPQSDLLAHPSIRLFVTHGGQNSIMEAIQHGVPMVGIPLFGDQPENMVRVEAKKFGVSIQLKKLKAETLALKMKQIMEDKRYKSAAVAASVILRSHPLSPTQRLVGWIDHVLQTGGATHLKPYVFQQPWHEQYLLDVFVFLLGLTLGTLWLCGKLLGMAVWWLRGARKVKET

SEQ ID NO: 13930 - protein, 120 aa, Homo Sapiens
MAGQRVLLLVGFLLPGVLLSEAAKILTISTVGGSHYLLMDRVSQILQDHGHNVTMLNHKRGPFMPDFKKEEKSYQVISWLAPEDHQREFKKSFDFFLEETLGGRTWRTSLPSLGTLVLSL

SEQ ID NO: 13931 - protein, 141 aa, Homo Sapiens
MKSYTPYFILLWSAVGIAKAAKIIIVPPIMFESHMYIFKTLASALHERGHHTVFLLSEGRDIAPSNHYSLQRYPGIFNSTTSDAFLQSKMRNIFSGRLTAIELFDILDHYTKNCDLMVGNHALIQGLKKEKFDLLLVDPND

SEQ ID NO: 13932 - protein, 541 aa, Homo Sapiens
MKSYTPYFILLWSAVGIAKAAKIIIVPPIMFESHMYIFKTLASALHERGHHTVFLLSEGRDIAPSNHYSLQRYPGIFNSTTSDAFLQSKMRNIFSGRLTAIELFDILDHYTKNCDLMVGNHALIQGLKKEKFDLLLVDPNDMCGFVIAHLLGVKYAVFSTGLWYPAEVGAPAPLAYVPEFNSLLTDRMNLLQRMKNTGVYLISRLGVSFLVLPKYERIMQKYNLLPEKSMYDLVHGSSLWMLCTDVALEFPRPTLPNVVYVGGILTKPASPLPEDLQRWVNGANEHGFVLVSFGAGVKYLSEDIANKLAGALGRLPQKVIWRFSGPKPKNLGNNTKLIEWLPQNDLLGHSKIKAFLSHGGLNSIFETIYHGVPVVGIPLFGDHYDTMTRVQAKGMGILLEWKTVTEKELYEALVKVINNPSYRQRAQKLSEIHKDQPGHPVNRTIYWIDYIIRHNGAHHLRAAVHQISFCQYFLLDIAFVLLLGAALLYFLLSWVTKFIYRKIKSLWSRNKHSTVNGHYHNGILNGKYKRNGHIKHEKKVK

SEQ ID NO: 13933 - protein, 541 aa, Homo Sapiens; identical to SEQ ID NO: 13932

SEQ ID NO: 13934 - protein, 244 aa, Homo Sapiens
MAAAASPAILPRLAILPYLLFDWSGTGRADAHSLWYNFTIIHLPRHGQQWCEVQSQVDQKNFLSYDCGSDKVLSMGHLEEQLYATDAWGKQLEMLREVGQRLRLELADTELEDFTPSGPLTLQVRMSCECEADGYIRGSWQFSFDGRKFLLFDSNNRKWTVVHAGARRMKEKWEKDSGLTTFFKMVSMRDCKSWLRDFLMHRKKRLEPTAPPTMAPGLAQPKAIATTLSPWSFLIILCFILPGI

SEQ ID NO: 13935 - protein, 244 aa, Homo Sapiens; identical to SEQ ID NO: 13934

SEQ ID NO: 13936 - protein, 29 aa, Homo Sapiens
MGQPSLTWMLMVVVASWFITTAATDTSEA

SEQ ID NO: 13937 - protein, 673 aa, Homo Sapiens
MGQPSLTWMLMVVVASWFITTAATDTSEARTKYNCPARWSWRTPQRGGDTEQGPDEDFTSQGRWCSECHSNATCTEDEAVTTCTCQEGFTGDGLTCVDLDECAIPGAHNCSANSSCVNTPGSFSCVCPEGFRLSPGLGCTDVDECAEPGLSHCHALATCVNVVGSYLCVCPAGYRGDGWHCECSPGSCGPGLDCVPEGDALVCADPCQAHRTLDEYWRSTEYGEGYACDTDLRGWYRFVGQGGARMAETCVPVLRCNTAAPMWLNGTHPSSDEGIVSRKACAHWSGHCCLWDASVQVKACAGGYYVYNLTAPPECHLAYCTDPSSVEGTCEECSIDEDCKSNNGRWHCQCKQDFNITDISLLEHRLECGANDMKVSLGKCQLKSLGFDKVFMYLSDSRCSGFNDRDNRDWVSVVTPARDGPCGTVLTRNETHATYSNTLYLADEIIIRDLNIKINFACSYPLDMKVSLKTALQPMVSALNIRVGGTGMFTVRMALFQTPSYTQPYQGSSVTLSTEAFLYVGTMLDGGDLSRFALLMTNCYATPSSNATDPLKYFIIQDRCPHTRDSTIQVVENGESSQGRFSVQMFRFAGNYDLVYLHCEVYLCDTMNEKCKPTCSGTRFRSGSVIDQSRVLNLGPITRKGVQATVSRAFSSLGLLKVWLPLLLSATLTLTFQ

SEQ ID NO: 13938 - protein, 161 aa, Homo Sapiens
MGQPSLTWMLMVVVASWFITTAATDTSEARTKYNCPARWSWRTPQRGGDTEQGPDEDFTSQGSRKHKMCKEREGQQVHRKSYQRWCSECHSNATCTEDEAVTTCTCQEGFTGDGLTCVDLDECAIPGAHNCSANSSCVNTPGSFSCVCPEGFRLSPGLGCT

SEQ ID NO: 13939 - protein, 161 aa, Homo Sapiens
MGQPSLTWMLMVVVASWFITTAATDTSEARTKYNCPARWSWRTPQRGGDTEQGWCSECHSNATCTEDEAVTTCTCQEGFTGDGLTCVDLDECAIPGAHNCSANSSCVNTPGSFSCVCPEGFRLSPGLGCTDVDECAEPGLSHCHALATCVNVVGSYLCVCP

SEQ ID NO: 13940 - protein, 86 aa, Homo Sapiens
MGQPSLTWMLMVVVASWFITTAATDTSEARWCSECHSNATCTEDEAVTTCTCQEGFTGDGLTCVDLDECAIPGAHNCSANSSCVNT

SEQ ID NO: 13941 - protein, 88 aa, Homo Sapiens
MGQPSLTWMLMVVVASWFITTAATDTSEARWCSECHSNATCTEDEAVTTCTCQEGFTGDGLTCVDLDECAIPGAHNCSANSSCVNTPG

SEQ ID NO: 13942 - protein, 103 aa, Homo Sapiens
MGQPSLTWMLMVVVASWFITTAATDTSEARWCSECHSNATCTEDEAVTTCTCQEGFTGDGLTCVDLDECAIPGAHNCSANSSCVNTPGSFSCVCPEGFRLSPG

SEQ ID NO: 13943 - protein, 125 aa, Homo Sapiens
MGQPSLTWMLMVVVASWFITTAATDTSEARWCSECHSNATCTEDEAVTTCTCQEGFTGDGLTCVDLDECAIPGAHNCSANSSCVNTPGSFSCVCPEGFRLSPGLGCTDVDECAEPGLSHCHALAT

SEQ ID NO: 13944 - protein, 640 aa, Homo Sapiens
MGQPSLTWMLMVVVASWFITTAATDTSEARWCSECHSNATCTEDEAVTTCTCQEGFTGDGLTCVDLDECAIPGAHNCSANSSCVNTPGSFSCVCPEGFRLSPGLGCTDVDECAEPGLSHCHALATCVNVVGSYLCVCPAGYRGDGWHCECSPGSCGPGLDCVPEGDALVCADPCQAHRTLDEYWRSTEYGEGYACDTDLRGWYRFVGQGGARMAETCVPVLRCNTAAPMWLNGTHPSSDEGIVSRKACAHWSGHCCLWDASVQVKACAGGYYVYNLTAPPECHLAYCTDPSSVEGTCEECSIDEDCKSNNGRWHCQCKQDFNITDISLLEHRLECGANDMKVSLGKCQLKSLGFDKVFMYLSDSRCSGFNDRDNRDWVSVVTPARDGPCGTVLTRNETHATYSNTLYLADEIIIRDLNIKINFACSYPLDMKVSLKTALQPMVSALNIRVGGTGMFTVRMALFQTPSYTQPYQGSSVTLSTEAFLYVGTMLDGGDLSRFALLMTNCYATPSSNATDPLKYFIIQDRCPHTRDSTIQVVENGESSQGRFSVQMFRFAGNYDLVYLHCEVYLCDTMNEKCKPTCSGTRFRSGSVIDQSRVLNLGPITRKGVQATVSRAFSSLGLLKVWLPLLLSATLTLTFQ

SEQ ID NO: 13945 - protein, 640 aa, Homo Sapiens; identical to SEQ ID NO: 13944

SEQ ID NO: 13946 - protein, 689 aa, Homo Sapiens
MRHIMTRLTLPFWLQDTRHQRQREKFKGPTRLSFGQVLSRPEVAGRAERMGQPSLTWMLMVVVASWFITTAATDTSEARWCSECHSNATCTEDEAVTTCTCQEGFTGDGLTCVDLDECAIPGAHNCSANSSCVNTPGSFSCVCPEGFRLSPGLGCTDVDECAEPGLSHCHALATCVNVVGSYLCVCPAGYRGDGWHCECSPGSCGPGLDCVPEGDALVCADPCQAHRTLDEYWRSTEYGEGYACDTDLRGWYRFVGQGGARMAETCVPVLRCNTAAPMWLNGTHPSSDEGIVSRKACAHWSGHCCLWDASVQVKACAGGYYVYNLTAPPECHLAYCTDPSSVEGTCEECSIDEDCKSNNGRWHCQCKQDFNITDISLLEHRLECGANDMKVSLGKCQLKSLGFDKVFMYLSDSRCSGFNDRDNRDWVSVVTPARDGPCGTVLTRNETHATYSNTLYLADEIIIRDLNIKINFACSYPLDMKVSLKTALQPMVSALNIRVGGTGMFTVRMALFQTPSYTQPYQGSSVTLSTEAFLYVGTMLDGGDLSRFALLMTNCYATPSSNATDPLKYFIIQDRCPHTRDSTIQVVENGESSQGRFSVQMFRFAGNYDLVYLHCEVYLCDTMNEKCKPTCSGTRFRSGSVIDQSRVLNLGPITRKGVQATVSRAFSSLGLLKVWLPLLLSATLTLTFQ

SEQ ID NO: 13947 - protein, 138 aa, Homo Sapiens
MRHIMTRLTLPFWLQVLSRPEVAGRAERMGQPSLTWMLMVVVASWFITTAATDTSEARWCSECHSNATCTEDEAVTTCTCQEGFTGDGLTCVDLDECAIPGAHNCSANSSCVNTPGSFSCVCPEGFRLSPGLGCTDVD

SEQ ID NO: 13948 - protein, 890 aa, Homo Sapiens
DDDFFHELPETFPSDPPEPLPHFLIEPEEAYIVKNKPVNLYCKASPATQIYFKCNSEWVHQKDHIVDERVDETSGLIVREVSIEISRQQVEELFGPEDYWCQCVAWSSAGTTKSRKAYVRIAYLRKTFEQEPLGKEVSLEQEVLLQCRPPEGIPVAEVEWLKNEDIIDPVEDRNFYITIDHNLIIKQARLSDTANYTCVAKNIVAKRKSTTATVIVYVNGGWSTWTEWSVCNSRCGRGYQKRTRTCTNPAPLNGGAFCEGQSVQKIACTTLCPVDGRWTPWSKWSTCGTECTHWRRRECTAPAPKNGGKDCDGLVLQSKNCTDGLCMQTAPDSDDVALYVGIVIAVIVCLAISVVVALFVYRKNHRDFESDIIDSSALNGGFQPVNIKAARQDLLAVPPDLTSAAAMYRGPVYALHDVSDKIPMTNSPILDPLPNLKIKVYNTSGAVTPQDDLSEFTSKLSPQMTQSLLENEALSLKNQSLARQTDPSCTAFGSFNSLGGHLIVPNSGVSLLIPAGAIPQGRVYEMYVTVHRKETMRPPMDDSQTLLTPVVSCGPPGALLTRPVVLTMHHCADPNTEDWKILLKNQAAQGQWEDVVVVGEENFTTPCYIQLDAEACHILTENLSTYALVGHSTTKAAAKRLKLAIFGPLCCSSLEYSIRVYCLDDTQDALKEILHLERQMGGQLLEEPKALHFKGSTHNLRLSIHDIAHSLWKSKLLAKYQEIPFYHVWSGSQRNLHCTFTLERFSLNTVELVCKLCVRQVEGEGQIFQLNCTVSEEPTGIDLPLLDPANTITTVTGPSAFSIPLPIRQKLCSSLDAPQTRGHDWRMLAHKLNLDRYLNYFATKSSPTGVILDLWEAQNFPDGNLSMLAAVLEEMGRHETVVSLAAEGQY

SEQ ID NO: 13949 - protein, 931 aa, Homo Sapiens
MRKGLRATAARCGLGLGYLLQMLVLPALALLSASGTGSAAQDDDFFHELPETFPSDPPEPLPHFLIEPEEAYIVKNKPVNLYCKASPATQIYFKCNSEWVHQKDHIVDERVDETSGLIVREVSIEISRQQVEELFGPEDYWCQCVAWSSAGTTKSRKAYVRIAYLRKTFEQEPLGKEVSLEQEVLLQCRPPEGIPVAEVEWLKNEDIIDPVEDRNFYITIDHNLIIKQARLSDTANYTCVAKNIVAKRKSTTATVIVYVNGGWSTWTEWSVCNSRCGRGYQKRTRTCTNPAPLNGGAFCEGQSVQKIACTTLCPVDGRWTPWSKWSTCGTECTHWRRRECTAPAPKNGGKDCDGLVLQSKNCTDGLCMQTAPDSDDVALYVGIVIAVIVCLAISVVVALFVYRKNHRDFESDIIDSSALNGGFQPVNIKAARQDLLAVPPDLTSAAAMYRGPVYALHDVSDKIPMTNSPILDPLPNLKIKVYNTSGAVTPQDDLSEFTSKLSPQMTQSLLENEALSLKNQSLARQTDPSCTAFGSFNSLGGHLIVPNSGVSLLIPAGAIPQGRVYEMYVTVHRKETMRPPMDDSQTLLTPVVSCGPPGALLTRPVVLTMHHCADPNTEDWKILLKNQAAQGQWEDVVVVGEENFTTPCYIQLDAEACHILTENLSTYALVGHSTTKAAAKRLKLAIFGPLCCSSLEYSIRVYCLDDTQDALKEILHLERQMGGQLLEEPKALHFKGSTHNLRLSIHDIAHSLWKSKLLAKYQEIPFYHVWSGSQRNLHCTFTLERFSLNTVELVCKLCVRQVEGEGQIFQLNCTVSEEPTGIDLPLLDPANTITTVTGPSAFSIPLPIRQKLCSSLDAPQTRGHDWRMLAHKLNLDRYLNYFATKSSPTGVILDLWEAQNFPDGNLSMLAAVLEEMGRHETVVSLAAEGQY

SEQ ID NO: 13950 - protein, 260 aa, Homo Sapiens
MRKGLRATAARCGLGLGYLLQMLVLPALALLSASGTGSAAQDDDFFHELPETFPSDPPEPLPHFLIEPEEAYIVKNKPVNLYCKASPATQIYFKCNSEWVHQKDHIVDERVDETSGLIVREVSIEISRQQVEELFGPEDYWCQCVAWSSAGTTKSRKAYVRIAYLRKTFEQEPLGKEVSLEQEVLLQCRPPEGIPVAEVEWLKNEDIIDPVEDRNFYITIDHNLIIKQARLSDTANYTCVAKNIVAKRKSTTATVIVYGP

SEQ ID NO: 13951 - protein, 597 aa, Homo Sapiens
MRKGLRATAARCGLGLGYLLQMLVLPALALLSASGTGSAAQDDDFFHELPETFPSDPPEPLPHFLIEPEEAYIVKNKPVNLYCKASPATQIYFKCNSEWVHQKDHIVDERVDETSGLIVREVSIEISRQQVEELFGPEDYWCQCVAWSSAGTTKSRKAYVRIAYLRKTFEQEPLGKEVSLEQEVLLQCRPPEGIPVAEVEWLKNEDIIDPVEDRNFYITIDHNLIIKQARLSDTANYTCVAKNIVAKRKSTTATVIVYVNGGWSTWTEWSVCNSRCGRGYQKRTRTCTNPAPLNGGAFCEGQSVQKIACTTLCPVDGRWTPWSKWSTCGTECTHWRRRECTAPAPKNGGKDCDGLVLQSKNCTDGLCMQSFIYPISTEQRTQNEYGFSSAPDSDDVALYVGIVIAVIVCLAISVVVALFVYRKNHRDFESDIIDSSALNGGFQPVNIKAARQDLLAVPPDLTSAAAMYRGPVYALHDVSDKIPMTNSPILDPLPNLKIKVYNTSGAVTPQDDLSEFTSKLSPQMTQSLLENEALSLKNQSLARQTDPSCTAFGSFNSLGGHLIVPNSGVSLLIPAGAIPQGRVYEMYVTVHRKETMR

SEQ ID NO: 13952 - protein, 745 aa, Homo Sapiens
MRKGLRATAARCGLGLGYLLQMLVLPALALLSASGTGSAAQDDDFFHELPETFPSDPPEPLPHFLIEPEEAYIVKNKPVNLYCKASPATQIYFKCNSEWVHQKDHIVDERVDETSGLIVREVSIEISRQQVEELFGPEDYWCQCVAWSSAGTTKSRKAYVRIAYLRKTFEQEPLGKEVSLEQEVLLQCRPPEGIPVAEVEWLKNEDIIDPVEDRNFYITIDHNLIIKQARLSDTANYTCVAKNIVAKRKSTTATVIVYVNGGWSTWTEWSVCNSRCGRGYQKRTRTCTNPAPLNGGAFCEGQSVQKIACTTLCPVDGRWTPWSKWSTCGTECTHWRRRECTAPAPKNGGKDCDGLVLQSKNCTDGLCMQSFIYPISTEQRTQNEYGFSSAPDSDDVALYVGIVIAVIVCLAISVVVALFVYRKNHRDFESDIIDSSALNGGFQPVNIKAARQDLLAVPPDLTSAAAMYRGPVYALHDVSDKIPMTNSPILDPLPNLKIKVYNTSGAVTPQDDLSEFTSKLSPQMTQSLLENEALSLKNQSLARQTDPSCTAFGSFNSLGGHLIVPNSGVSLLIPAGAIPQGRVYEMYVTVHRKETMRPPMDDSQTLLTPVVSCGPPGALLTRPVVLTMHHCADPNTEDWKILLKNQAAQGQWEDVVVVGEENFTTPCYIQLDAEACHILTENLSTYALVGHSTTKAAAKRLKLAIFGPLCCSSLEYSIRVYCLDDTQDALKEILHLERQMGGQLL

SEQ ID NO: 13953 - protein, 265 aa, Homo Sapiens
MGLPWGQPHLGLQMLLLALNCLRPSLSLELVPYTPQITAWDLEGKVTATTFSLEQPRCVFDGLASASDTVWLVVAFSNASRGFQNPETLADIPASPQLLTDGHYMTLPLSPDQLPCGDPMAGSGGAPVLRVGHDHGCHQQPFCNAPLPGPGPYREDPRIHRHLARAAKWQHDRHYLHPLFSGRPPTLGLLGSLYHALLQPVVAGGGPGAAADRLLHGQALHDPPHPTQRGRHTAGGLQAWPGPPPQPQPLAWPLCMGLGEMGRWE

SEQ ID NO: 13954 - protein, 276 aa, Homo Sapiens
MGLPWGQPHLGLQMLLLALNCLRPSLSLELVPYTPQITAWDLEGKVTATTFSLEQPRCVFDGLASASDTVWLVVAFSNASRGFQNPETLADIPASPQLLTDGHYMTLPLSPDQLPCGDPMAGSGGAPVLRVGHDHGCHQQPFCNAPLPGPGPYRVKFLLMDTRGSPRAETKWSDPITLHQGKTPGSIDTWPGRRSGSMIVITSILSSLAGLLLLAFLAASTMRFSSLWWPEEAPEQLRIGSFMGKRYMTHHIPPREAATLPVGCKPGLDPLPSLSP

SEQ ID NO: 13955 - protein, 320 aa, Homo Sapiens
MGLPWGQPHLGLQMLLLALNCLRPSLSLGEWGSWMDASSQTQGAGGPAGVIGPWAPAPLRLGEAAPGTPTPVSVAHLLSPVATELVPYTPQITAWDLEGKVTATTFSLEQPRCVFDGLASASDTVWLVVAFSNASRGFQNPETLADIPASPQLLTDGHYMTLPLSPDQLPCGDPMAGSGGAPVLRVGHDHGCHQQPFCNAPLPGPGPYREDPRIHRHLARAAKWQHDRHYLHPLFSGRPPTLGLLGSLYHALLQPVVAGGGPGAAADRLLHGQALHDPPHPTQRGRHTAGGLQAWPGPPPQPQPLAWPLCMGLGEMGRWE

SEQ ID NO: 13956 - protein, 920 aa, Homo Sapiens
MATVAANPAAAAAAVAAAAAVTEDREPQHEELPGLDSQWRQIENGESGRERPLRAGESWFLVEKHWYKQWEAYVQGGDQDSSTFPGCINNATLFQDEINWRLKEGLVEGEDYVLLPAAAWHYLVSWYGLEHGQPPIERKVIELPNIQKVEVYPVELLLVRHNDLGKSHTVQFSHTDSIGLVLRTARERFLVEPQEDTRLWAKNSEGSLDRLYDTHITVLDAALETGQLIIMETRKKDGTWPSAQLHVMNNNMSEEDEDFKGQPGICGLTNLGNTCFMNSALQCLSNVPQLTEYFLNNCYLEELNFRNPLGMKGEIAEAYADLVKQAWSGHHRSIVPHVFKNKVGHFASQFLGYQQHDSQELLSFLLDGLHEDLNRVKKKEYVELCDAAGRPDQEVAQEAWQNHKRRNDSVIVDTFHGLFKSTLVCPDCGNVSVTFDPFCYLSVPLPISHKRVLEVFFIPMDPRRKPEQHRLVVPKKGKISDLCVALSKHTGISPERMMVADVFSHRFYKLYQLEEPLSSILDRDDIFVYEVSGRIEAIEGSREDIVVPVYLRERTPARDYNNSYYGLMLFGHPLLVSVPRDRFTWEGLYNVLMYRLSRYVTKPNSDDEDDGDEKEDDEEDKDDVPGPSTGGSLRDPEPEQAGPSSGVTNRCPFLLDNCLGTSQWPPRRRRKQLFTLQTVNSNGTSDRTTSPEEVHAQPYIAIDWEPEMKKRYYDEVEAEGYVKHDCVGYVMKKAPVRLQECIELFTTVETLEKENPWYCPSCKQHQLATKKLDLWMLPEILIIHLKRFSYTKFSREKLDTLVEFPIRDLDFSEFVIQPQNESNPELYKYDLIAVSNHYGGMRDGHYTTFACNKDSGQWHYFDDNSVSPVNENQIESKAAYVLFYQRQDVARRLLSPAGSSGAPASPACSSPPSSEFMDVN

SEQ ID NO: 13957 - protein, 963 aa, Homo Sapiens
MAVAPRLFGGLCFRFRDQNPEVAVEGRLPISHSCVGCRRERTAMATVAANPAAAAAAVAAAAAVTEDREPQHEELPGLDSQWRQIENGESGRERPLRAGESWFLVEKHWYKQWEAYVQGGDQDSSTFPGCINNATLFQDEINWRLKEGLVEGEDYVLLPAAAWHYLVSWYGLEHGQPPIERKVIELPNIQKVEVYPVELLLVRHNDLGKSHTVQFSHTDSIGLVLRTARERFLVEPQEDTRLWAKNSEGSLDRLYDTHITVLDAALETGQLIIMETRKKDGTWPSAQLHVMNNNMSEEDEDFKGQPGICGLTNLGNTCFMNSALQCLSNVPQLTEYFLNNCYLEELNFRNPLGMKGEIAEAYADLVKQAWSGHHRSIVPHVFKNKVGHFASQFLGYQQHDSQELLSFLLDGLHEDLNRVKKKEYVELCDAAGRPDQEVAQEAWQNHKRRNDSVIVDTFHGLFKSTLVCPDCGNVSVTFDPFCYLSVPLPISHKRVLEVFFIPMDPRRKPEQHRLVVPKKGKISDLCVALSKHTGISPERMMVADVFSHRFYKLYQLEEPLSSILDRDDIFVYEVSGRIEAIEGSREDIVVPVYLRERTPARDYNNSYYGLMLFGHPLLVSVPRDRFTWEGLYNVLMYRLSRYVTKPNSDDEDDGDEKEDDEEDKDDVPGPSTGGSLRDPEPEQAGPSSGVTNRCPFLLDNCLGTSQWPPRRRRKQLFTLQTVNSNGTSDRTTSPEEVHAQPYIAIDWEPEMKKRYYDEVEAEGYVKHDCVGYVMKKAPVRLQECIELFTTVETLEKENPWYCPSCKQHQLATKKLDLWMLPEILIIHLKRFSYTKFSREKLDTLVEFPIRDLDFSEFVIQPQNESNPELYKYDLIAVSNHYGGMRDGHYTTFACNKDSGQWHYFDDNSVSPVNENQIESKAAYVLFYQRQDVARRLLSPAGSSGAPASPACSSPPSSEFMDVN

SEQ ID NO: 13958 - protein, 49 aa, Homo Sapiens
METRKKDGTWPSAQLHVMNNNMSEEDEDFKGQPGICGLTNLGNTCFMNS

SEQ ID NO: 13959 - protein, 140 aa, Homo Sapiens
METRKKDGTWPSAQLHVMNNNMSEEDEDFKGQPGICGLTNLGNTCFMNSALQCLSNVPQLTEYFLNNCYLEELNFRNPLGMKGEIAEAYADLVKQAWSGHHRSIVPHVFKNKVGHFASQFLGYQQHDSQELLSFLLDGLH

SEQ ID NO: 13960 - protein, 494 aa, Homo Sapiens
MPLYSVTVKWGKEKFEGVELNTDEPPMVFKAQLFALTGVQPARQKVMVKGGTLKDDDWGNIKIKNGMTLLMMGSADALPEEPSAKTVFVEDMTEEQLASAMELPCGLTNLGNTCYMNATVQCIRSVPELKDALKRYAGALRASGEMASAQYITAALRDLFDSMDKTSSSIPPIILLQFLHMAFPQFAEKGEQGQYLQQDANECWIQMMRVLQQKLEAIEDDSVKETDSSSASAATPSKKKSLIDQFFGVEFETTMKCTESEEEEVTKGKENQLQLSCFINQEVKYLFTGLKLRLQEEITKQSPTLQRNALYIKSSKISRLPAYLTIQMVRFFYKEKESVNAKVLKDVKFPLMLDMYELCTPELQEKMVSFRSKFKDLEDKKVNQQPNTSDKKSSPQKEVKYEPFSFADDIGSNNCGYYDLQAVLTHQGRSSSSGHYVSWVKRKQDEWIKFDDDKVSIVTPEDILRLSGGGDWHIAYVLLYGPRRVEIMEEESEQ

SEQ ID NO: 13961 - protein, 459 aa, Homo Sapiens
MPLYSVTVKWGKEKFEGVELNTDEPPMVFKAQLFALTGVQPARQKVMVKGGTLKDDDWGNIKIKNMELPCGLTNLGNTCYMNATVQCIRSVPELKDALKRYAGALRASGEMASAQYITAALRDLFDSMDKTSSSIPPIILLQFLHMAFPQFAEKGEQGQYLQQDANECWIQMMRVLQQKLEAIEDDSVKETDSSSASAATPSKKKSLIDQFFGVEFETTMKCTESEEEEVTKGKENQLQLSCFINQEVKYLFTGLKLRLQEEITKQSPTLQRNALYIKSSKISRLPAYLTIQMVRFFYKEKESVNAKVLKDVKFPLMLDMYELCTPELQEKMVSFRSKFKDLEDKKVNQQPNTSDKKSSPQKEVKYEPFSFADDIGSNNCGYYDLQAVLTHQGRSSSSGHYVSWVKRKQDEWIKFDDDKVSIVTPEDILRLSGGGDWHIAYVLLYGPRRVEIMEEESEQ

SEQ ID NO: 13962 - protein, 483 aa, Homo Sapiens
MPLYSVTVKWGKEKFEGVELNTDEPPMVFKAQLFALTGVQPARQKVMVKGGTLKGMTLLMMGSADALPEEPSAKTVFVEDMTEEQLASAMELPCGLTNLGNTCYMNATVQCIRSVPELKDALKRYAGALRASGEMASAQYITAALRDLFDSMDKTSSSIPPIILLQFLHMAFPQFAEKGEQGQYLQQDANECWIQMMRVLQQKLEAIEDDSVKETDSSSASAATPSKKKSLIDQFFGVEFETTMKCTESEEEEVTKGKENQLQLSCFINQEVKYLFTGLKLRLQEEITKQSPTLQRNALYIKSSKISRLPAYLTIQMVRFFYKEKESVNAKVLKDVKFPLMLDMYELCTPELQEKMVSFRSKFKDLEDKKVNQQPNTSDKKSSPQKEVKYEPFSFADDIGSNNCGYYDLQAVLTHQGRSSSSGHYVSWVKRKQDEWIKFDDDKVSIVTPEDILRLSGGGDWHIAYVLLYGPRRVEIMEEESEQ

SEQ ID NO: 13963 - protein, 448 aa, Homo Sapiens
MPLYSVTVKWGKEKFEGVELNTDEPPMVFKAQLFALTGVQPARQKVMVKGGTLKMELPCGLTNLGNTCYMNATVQCIRSVPELKDALKRYAGALRASGEMASAQYITAALRDLFDSMDKTSSSIPPIILLQFLHMAFPQFAEKGEQGQYLQQDANECWIQMMRVLQQKLEAIEDDSVKETDSSSASAATPSKKKSLIDQFFGVEFETTMKCTESEEEEVTKGKENQLQLSCFINQEVKYLFTGLKLRLQEEITKQSPTLQRNALYIKSSKISRLPAYLTIQMVRFFYKEKESVNAKVLKDVKFPLMLDMYELCTPELQEKMVSFRSKFKDLEDKKVNQQPNTSDKKSSPQKEVKYEPFSFADDIGSNNCGYYDLQAVLTHQGRSSSSGHYVSWVKRKQDEWIKFDDDKVSIVTPEDILRLSGGGDWHIAYVLLYGPRRVEIMEEESEQ

SEQ ID NO: 13964 - protein, 20 aa, Homo Sapiens
MVFKAQLFALTGVQPARQKV

SEQ ID NO: 13965 - protein, 28 aa, Homo Sapiens
MVFKAQLFALTGVQPARQKVMVKGGTLK

SEQ ID NO: 13966 - protein, 33 aa, Homo Sapiens
  misc_feature (1)..(1): Xaa can be any naturally occurring amino acid
XALTGVQPARQKVMVKGGTLKDFHEITFFKNRE

SEQ ID NO: 13967 - protein, 106 aa, Homo Sapiens
HWTAYLRNKVDTYVEFPLRGLDMKCYLLEPENSGPESCLYDLAAVVVHHGSGVGSGHYTAYATHEGRWFHFNDSTVTLTDEETVVKAKAYILFYVEHQAKAGSDKL

SEQ ID NO: 13968 - protein, 56 aa, Homo Sapiens
MECPHLSSSVCIAPDSAKFPNGSPSSWCCSAFKCLSGVTVLCPQRVLYVAQAGLEL

SEQ ID NO: 13969 - protein, 56 aa, Homo Sapiens; identical to SEQ ID NO: 13968

SEQ ID NO: 13970 - protein, 132 aa, Homo Sapiens
MECPHLSSSVCIAPDSAKFPNGSPSSWCCSEMEFHHFTKAGLELLDSSNLPASASQSVGTTVCRSNKSPWVCLTCSSVHCGRYVNGHAKKHYEDAQVPLTNHKKSEKQDKVQHTVCMDCSSYSTYCYRCDDF

SEQ ID NO: 13971 - protein, 79 aa, Homo Sapiens
MECPHLSSSVCIAPDSAKFPNGSPSSWCCSGAINSRTPMNSCATFWTTYTWNFRAVSTVFPAQQFCRRILLCLQVTSVA

SEQ ID NO: 13972 - protein, 55 aa, Homo Sapiens
MECPHLSSSVCIAPDSAKFPNGSPSSWCCSVCRSNKSPWVCLTCSSVHCGRIWGT

SEQ ID NO: 13973 - protein, 520 aa, Homo Sapiens
MECPHLSSSVCIAPDSAKFPNGSPSSWCCSVCRSNKSPWVCLTCSSVHCGRYVNGHAKKHYEDAQVPLTNHKKSEKQDKVQHTVCMDCSSYSTYCYRCDDFVVNDTKLGLVQKVREHLQNLENSAFTADRHKKRKLLENSTLNSKLLKVNGSTTAICATGLRNLGNTCFMNAILQSLSNIEQFCCYFKELPAVELRNGKTAGRRTYHTRSQGDNNVSLVEEFRKTLCALWQGSQTAFSPESLFYVVWKIMPNFRGYQQQDAHEFMRYLLDHLHLELQGGFNGVSRSAILQENSTLSASNKCCINGASTVVTAIFGGILQNEVNCLICGTESRKFDPFLDLSLDIPSQFRSKRSKNQENGPVCSLRDCLRSFTDLEELDETELYMCHKCKKKQKSTKKFWIQKLPKVLCLHLKRFHWTAYLRNKVDTYVEFPLRGLDMKCYLLEPENSGPESCLYDLAAVVVHHGSGVGSGHYTAYATHEGRWFHFNDSTVTLTDEETVVKAKAYILFYVEHQAKAGSDKL

SEQ ID NO: 13974 - protein, 133 aa, Homo Sapiens
MECPHLSSSVCIAPDSAKFPNGSPSSWCCSVCRSNKSPWVCLTCSSVHCGSYRCDDFVVNDTKLGLVQKVREHLQNLENSAFTADRHKKRKLLENSTLNSKLLKVNGSTTAICATGLRNLGNTCFMNAILQSL

SEQ ID NO: 13975 - protein, 476 aa, Homo Sapiens
MECPHLSSSVCIAPDSAKFPNGSPSSWCCSVCRSNKSPWVCLTCSSVHCGSYRCDDFVVNDTKLGLVQKVREHLQNLENSAFTADRHKKRKLLENSTLNSKLLKVNGSTTAICATGLRNLGNTCFMNAILQSLSNIEQFCCYFKELPAVELRNGKTAGRRTYHTRSQGDNNVSLVEEFRKTLCALWQGSQTAFSPESLFYVVWKIMPNFRGYQQQDAHEFMRYLLDHLHLELQGGFNGVSRSAILQENSTLSASNKCCINGASTVVTAIFGGILQNEVNCLICGTESRKFDPFLDLSLDIPSQFRSKRSKNQENGPVCSLRDCLRSFTDLEELDETELYMCHKCKKKQKSTKKFWIQKLPKVLCLHLKRFHWTAYLRNKVDTYVEFPLRGLDMKCYLLEPENSGPESCLYDLAAVVVHHGSGVGSGHYTAYATHEGRWFHFNDSTVTLTDEETVVKAKAYILFYVEHQAKAGSDKL

SEQ ID NO: 13976 - protein, 431 aa, Homo Sapiens
MENTEGYRCDDFVVNDTKLGLVQKVREHLQNLENSAFTADRHKKRKLLENSTLNSKLLKVNGSTTAICATGLRNLGNTCFMNAILQSLSNIEQFCCYFKELPAVELRNGKTAGRRTYHTRSQGDNNVSLVEEFRKTLCALWQGSQTAFSPESLFYVVWKIMPNFRGYQQQDAHEFMRYLLDHLHLELQGGFNGVSRSAILQENSTLSASNKCCINGASTVVTAIFGGILQNEVNCLICGTESRKFDPFLDLSLDIPSQFRSKRSKNQENGPVCSLRDCLRSFTDLEELDETELYMCHKCKKKQKSTKKFWIQKLPKVLCLHLKRFHWTAYLRNKVDTYVEFPLRGLDMKCYLLEPENSGPESCLYDLAAVVVHHGSGVGSGHYTAYATHEGRWFHFNDSTVTLTDEETVVKAKAYILFYVEHQAKAGSDKL

SEQ ID NO: 13977 - protein, 503 aa, Homo Sapiens
MMQLVYCVFFFLLVCRSNKSPWVCLTCSSVHCGRYVNGHAKKHYEDAQVPLTNHKKSEKQDKVQHTVCMDCSSYSTYCYRCDDFVVNDTKLGLVQKVREHLQNLENSAFTADRHKKRKLLENSTLNSKLLKVNGSTTAICATGLRNLGNTCFMNAILQSLSNIEQFCCYFKELPAVELRNGKTAGRRTYHTRSQGDNNVSLVEEFRKTLCALWQGSQTAFSPESLFYVVWKIMPNFRGYQQQDAHEFMRYLLDHLHLELQGGFNGVSRSAILQENSTLSASNKCCINGASTVVTAIFGGILQNEVNCLICGTESRKFDPFLDLSLDIPSQFRSKRSKNQENGPVCSLRDCLRSFTDLEELDETELYMCHKCKKKQKSTKKFWIQKLPKVLCLHLKRFHWTAYLRNKVDTYVEFPLRGLDMKCYLLEPENSGPESCLYDLAAVVVHHGSGVGSGHYTAYATHEGRWFHFNDSTVTLTDEETVVKAKAYILFYVEHQAKAGSDKL

SEQ ID NO: 13978 - protein, 39 aa, Homo Sapiens
MQSPPHLAVCRSNKSPWVCLTCSSVHCGRYVNGHAKKHY

SEQ ID NO: 13979 - protein, 126 aa, Homo Sapiens
MQSPPHLAVCRSNKSPWVCLTCSSVHCGRYVNGHAKKHYEDAQVPLTNHKKSEKQDKVQHTVCMDCSSYSTYCYRCDDFVVNDTKLGLVQKVREHLQNLENSAFTADRHKKRKLLENSTLNSKLLK

SEQ ID NO: 13980 - protein, 498 aa, Homo Sapiens
MQSPPHLAVCRSNKSPWVCLTCSSVHCGRYVNGHAKKHYEDAQVPLTNHKKSEKQDKVQHTVCMDCSSYSTYCYRCDDFVVNDTKLGLVQKVREHLQNLENSAFTADRHKKRKLLENSTLNSKLLKVNGSTTAICATGLRNLGNTCFMNAILQSLSNIEQFCCYFKELPAVELRNGKTAGRRTYHTRSQGDNNVSLVEEFRKTLCALWQGSQTAFSPESLFYVVWKIMPNFRGYQQQDAHEFMRYLLDHLHLELQGGFNGVSRSAILQENSTLSASNKCCINGASTVVTAIFGGILQNEVNCLICGTESRKFDPFLDLSLDIPSQFRSKRSKNQENGPVCSLRDCLRSFTDLEELDETELYMCHKCKKKQKSTKKFWIQKLPKVLCLHLKRFHWTAYLRNKVDTYVEFPLRGLDMKCYLLEPENSGPESCLYDLAAVVVHHGSGVGSGHYTAYATHEGRWFHFNDSTVTLTDEETVVKAKAYILFYVEHQAKAGSDKL

SEQ ID NO: 13981 - protein, 443 aa, Homo Sapiens
  misc_feature (1)..(1): Xaa can be any naturally occurring amino acid
XKVQHTVCMDCSSYSTYCYRCDDFVVNDTKLGLVQKVREHLQNLENSAFTADRHKKRKLLENSTLNSKLLKVNGSTTAICATGLRNLGNTCFMNAILQSLSNIEQFCCYFKELPAVELRNGKTAGRRTYHTRSQGDNNVSLVEEFRKTLCALWQGSQTAFSPESLFYVVWKIMPNFRGYQQQDAHEFMRYLLDHLHLELQGGFNGVSRSAILQENSTLSASNKCCINGASTVVTAIFGGILQNEVNCLICGTESRKFDPFLDLSLDIPSQFRSKRSKNQENGPVCSLRDCLRSFTDLEELDETELYMCHKCKKKQKSTKKFWIQKLPKVLCLHLKRFHWTAYLRNKVDTYVEFPLRGLDMKCYLLEPENSGPESCLYDLAAVVVHHGSGVGSGHYTAYATHEGRWFHFNDSTVTLTDEETVVKAKAYILFYVEHQAKAGSDKL

SEQ ID NO: 13982 - protein, 6 aa, Homo Sapiens
  misc_feature (1)..(1): Xaa can be any naturally occurring amino acid
XSYSTY

SEQ ID NO: 13983 - protein, 211 aa, Homo Sapiens
KNADHLLHLKTKGPENIICSCISPCGSWIAYSTVSRFFLYRLNYEHDNISLKRVSKMPAFLRSALQILFSEDSTKLFVASNQGALHIVQLSGGSFKHLHAFQPQSGTVEAMCLLAVSPDGNWLAASGTSAGVHVYNVKQLKLHCTVPAYNFPVTAMAIAPNTNNLVIAHSDQQPLLFMDLLDERTLVAVERPLDDIIAQLPPPIKKKKFGT

SEQ ID NO: 13984 - protein, 182 aa, Homo Sapiens
MASVDLSYCSFLHLLLLCSPILACPPLNGIRCVAYNNQSNRLAVSRTDGTVEIYNLSANYFQEKFFPGHESRATEALCWAEGQRLFSAGLNGEIMEYDLQALNIKYAMDAFGGPIWSMAASPSGSQLLVGCEDGSVKLFQITPDKIQFERNFDRQKSRILSLSWHPSGTHIAAGSIDYISVF

SEQ ID NO: 13985 - protein, 79 aa, Homo Sapiens
MEYDLQALNIKYAMDAFGGPIWSMAASPSGSQLLVGCEDGSVKLFQITPDKIQFERNFDRQKSRILSLSWHPSGTHIAA

SEQ ID NO: 13986 - protein, 143 aa, Homo Sapiens
MEYDLQALNIKYAMDAFGGPIWSMAASPSGSQLLVGCEDGSVKLFQITPDKIQFERNFDRQKSRILSLSWHPSGTHIAAGSIDYISVFDVKSGSAVHKMIVDRQYMGVSKRKCIVWGVAFLSDGTIISVDSAGKVQFWDSATG

SEQ ID NO: 13987 - protein, 148 aa, Homo Sapiens
MGEFKVHRVRFFNYVPSGIRCVAYNNQSNRLAVSRTDGTVEIYNLSANYFQEKFFPGHESRATEALCWAEGQRLFSAGLNGEIMEYDLQALNIKYAMDAFGGPIWSMAASPSGSQLLVGCEDGSVKLFQITPDKIQFERNFDRQKSRI

SEQ ID NO: 13988 - protein, 571 aa, Homo Sapiens
MGEFKVHRVRFFNYVPSGIRCVAYNNQSNRLAVSRTDGTVEIYNLSANYFQEKFFPGHESRATEALCWAEGQRLFSAGLNGEIMEYDLQALNIKYAMDAFGGPIWSMAASPSGSQLLVGCEDGSVKLFQITPDKIQFERNFDRQKSRILSLSWHPSGTHIAAGSIDYISVFDVKSGSAVHKMIVDRQYMGVSKRKCIVWGVAFLSDGTIISVDSAGKVQFWDSATGTLVKSHLIANADVQSIAVADQEDSFVVGTAEGTVFHFQLVPVTSNSSEKQWVRTKPFQHHTHDVRTVAHSPTALISGGTDTHLVFRPLMEKVEVKNYDAALRKITFPHRCLISCSKKRQLLLFQFAHHLELWRLGSTVATGTVEAMCLLAVSPDGNWLAASGTSAGVHVYNVKQLKLHCTVPAYNFPVTAMAIAPNTNNLVIAHSDQQVFEYSIPDKQYTDWSRTVQKQGFHHLWLQRDTPITHISFHPKRPMHILLHDAYMFCIIDKSLPLPNDKTLLYNPFPPTNESDVIRRRTAHAFKISKIYKPLLFMDLLDERTLVAVERPLDDIIAQLPPPIKKKKFGT

SEQ ID NO: 13989 - protein, 686 aa, Homo Sapiens
MGEFKVHRVRFFNYVPSGIRCVAYNNQSNRLAVSRTDGTVEIYNLSANYFQEKFFPGHESRATEALCWAEGQRLFSAGLNGEIMEYDLQALNIKYAMDAFGGPIWSMAASPSGSQLLVGCEDGSVKLFQITPDKIQFERNFDRQKSRILSLSWHPSGTHIAAGSIDYISVFDVKSGSAVHKMIVDRQYMGVSKRKCIVWGVAFLSDGTIISVDSAGKVQFWDSATGTLVKSHLIANADVQSIAVADQEDSFVVGTAEGTVFHFQLVPVTSNSSEKQWVRTKPFQHHTHDVRTVAHSPTALISGGTDTHLVFRPLMEKVEVKNYDAALRKITFPHRCLISCSKKRQLLLFQFAHHLELWRLGSTVATGKNGDTLPLSKNADHLLHLKTKGPENIICSCISPCGSWIAYSTVSRFFLYRLNYEHDNISLKRVSKMPAFLRSALQILFSEDSTKLFVASNQGALHIVQLSGGSFKHLHAFQPQSGTVEAMCLLAVSPDGNWLAASGTSAGVHVYNVKQLKLHCTVPAYNFPVTAMAIAPNTNNLVIAHSDQQVFEYSIPDKQYTDWSRTVQKQGFHHLWLQRDTPITHISFHPKRPMHILLHDAYMFCIIDKSLPLPNDKTLLYNPFPPTNESDVIRRRTAHAFKISKIYKPLLFMDLLDERTLVAVERPLDDIIAQLPPPIKKKKFGT

SEQ ID NO: 13990 - protein, 625 aa, Homo Sapiens
MGEFKVHRVRFFNYVPSGIRCVAYNNQSNRLAVSRTDGTVEIYNLSANYFQEKFFPGHESRATEALCWAEGQRLFSAGLNGEIMEYDLQALNIKYAMDAFGGPIWSMAASPSGSQLLVGCEDGSVKLFQITPDKIQFERNFDRQKSRILSLSWHPSGTHIAAGSIDYISVFDVKSGSAVHKMIVDRQYMGVSKRKCIVWGVAFLSDGTIISVDSAGKVQFWDSATGTLVKSHLIANADVQSIAVADQEDSFVVGTAEGTVFHFQLVPVTSNSSEKQWVRTKPFQHHTHDVRTVAHSPTALISGGTDTHLVFRPLMEKVEVKNYDAALRKITFPHRCLISCSKKRQLLLFQFAHHLELWRLGSTVATGKNGDTLPLSKNADHLLHLKTKGPENIICSCISPCGSWIAYSTVSRFFLYRLNYEHDNISLKRVSKMPAFLRSALQILFSEDSTKLFVASNQGALHIVQLSGGSFKHLHAFQPQSGTVEAMCLLAVSPDGNWLAASGTSAGVHVYNVKQLKLHCTVPAYNFPVTAMAIAPNTNNLVIAHSDQQVFEYSIPDKQYTDWSRTVQKQGFHHLWLQRDTPITHISFHPKRPMHILLHDAYMFCIIDKSLVSSSLLPPKSSSES

SEQ ID NO: 13991 - protein, 198 aa, Homo Sapiens
MVFLQFFPGHESRATEALCWAEGQRLFSAGLNGEIMEYDLQALNIKYAMDAFGGPIWSMAASPSGSQLLVGCEDGSVKLFQITPDKIQFERNFDRQKSRILSLSWHPSGTHIAAGSIDYISVFDVKSGSAVHKMIVDRQYMGVSKRKCIVWGVAFLSDGTIISVDSAGKVQFWDSATGTLVKSHLIANADVQSIAVAD

SEQ ID NO: 13992 - protein, 700 aa, Homo Sapiens
RSTSGAEPESARARGAGAERGEHREGERGAAGIRCVAYNNQSNRLAVSRTDGTVEIYNLSANYFQEKFFPGHESRATEALCWAEGQRLFSAGLNGEIMEYDLQALNIKYAMDAFGGPIWSMAASPSGSQLLVGCEDGSVKLFQITPDKIQFERNFDRQKSRILSLSWHPSGTHIAAGSIDYISVFDVKSGSAVHKMIVDRQYMGVSKRKCIVWGVAFLSDGTIISVDSAGKVQFWDSATGTLVKSHLIANADVQSIAVADQEDSFVVGTAEGTVFHFQLVPVTSNSSEKQWVRTKPFQHHTHDVRTVAHSPTALISGGTDTHLVFRPLMEKVEVKNYDAALRKITFPHRCLISCSKKRQLLLFQFAHHLELWRLGSTVATGKNGDTLPLSKNADHLLHLKTKGPENIICSCISPCGSWIAYSTVSRFFLYRLNYEHDNISLKRVSKMPAFLRSALQILFSEDSTKLFVASNQGALHIVQLSGGSFKHLHAFQPQSGTVEAMCLLAVSPDGNWLAASGTSAGVHVYNVKQLKLHCTVPAYNFPVTAMAIAPNTNNLVIAHSDQQVFEYSIPDKQYTDWSRTVQKQGFHHLWLQRDTPITHISFHPKRPMHILLHDAYMFCIIDKSLPLPNDKTLLYNPFPPTNESDVIRRRTAHAFKISKIYKPLLFMDLLDERTLVAVERPLDDIIAQLPPPIKKKKFGT

SEQ ID NO: 13993 - protein, 139 aa, Homo Sapiens
METNVFHLMLCVTSARTHKSTSLCFGHFNSYPSLPLIHDLLLEISFQLSAPHEDARLTPEELERASLLQILPEMLGAERGDILRKADSSTNIFNPRGNLRKFQDFSGQDPNILLSHLLARIWKPYKKRETPDCFWKYCV

SEQ ID NO: 13994 - protein, 139 aa, Homo Sapiens
MYKLASCCLLFIGFLNPLLSLPLLDSREISFQLSAPHEDARLTPEELERASLLQILPEMLGAERGDILRKADSSTNIFNPRGNLRKFQDFSGQDPNILLSHLLARIWKPYKKQRRKLRQDLRLWKKEPGLRIFKNYVWV

SEQ ID NO: 13995 - protein, 124 aa, Homo Sapiens
MYKLASCCLLFIGFLNPLLSLPLLDSREISFQLSAPHEDARLTPEELERASLLQILPEMLGAERGDILRKADSSTNIFNPRGNLRKFQDFSGQDPNILLSHLLARIWKPYKKRETPDCFWKYCV

SEQ ID NO: 13996 - protein, 38 aa, Homo Sapiens
MNKILSSTVCFGLLTLLSVLSFLQSVHGRPYLTQGNEI

SEQ ID NO: 13997 - protein, 81 aa, Homo Sapiens
MNKILSSTVCFGLLTLLSVLSFLQSVHGRPYLTQGNEIFPDKKYTNREELLLALLNKNFDFQRPFNTAGKAKRTASGGEGF

SEQ ID NO: 13998 - protein, 81 aa, Homo Sapiens; identical to SEQ ID NO: 13997

SEQ ID NO: 13999 - protein, 119 aa, Homo Sapiens
MNKILSSTVCFGLLTLLSVLSFLQSVHGRPYLTQGNEIFPDKKYTNREELLLALLNKNFDFQRPFNTDLALPNKLEELNQLEKLKEQLVEEKDSETSYAVDGLFSSHPSKRACFWKYCV

SEQ ID NO: 14000 - protein, 119 aa, Homo Sapiens; identical to SEQ ID NO: 13999

SEQ ID NO: 14001 - protein, 132 aa, Homo Sapiens
MNKILSSTVCFGLLTLLSVLSFLQSVHGRPYLTQGNEIFPDKKYTNREELLLALLNKNFDFQRPFNTDLALPNKLEELNQLEKLKEQLVEEKDSETSYAVDGLFSSHPSKRALSSRTLIQLNCLQHCQNRRG

SEQ ID NO: 14002 - protein, 1240 aa, Homo Sapiens
MKSCAVSLTTAAVAFGDEAKKMAEGKASRESEEESVSLTVEEREALGGMDSRLFGFVRLHEDGARTKTLLGKAVRCYESLILKAEGKVESDFFCQLGHFNLLLEDYSKALSAYQRYYSLQADYWKNAAFLYGLGLVYFYYNAFHWAIKAFQDVLYVDPSFCRAKEIHLRLGLMFKVNTDYKSSLKHFQLALIDCNPCTLSNAEIQFHIAHLYETQRKYHSAKEAYEQLLQTENLPAQVKATVLQQLGWMHHNMDLVGDKATKESYAIQYLQKSLEADPNSGQSWYFLGRCYSSIGKVQDAFISYRQSIDKSEASADTWCSIGVLYQQQNQPMDALQAYICAVQLDHGHAAAWMDLGTLYESCNQPQDAIKCYLNAARSKRCSNTSTLAARIKFLQNGSDNWNGGQSLSHHPVQQVYSLCLTPQKLQHLEQLRANRDNLNPAQKHQLEQLESQFVLMQQMRHKEVAQVRTTGIHNGAITDSSLPTNSVSNRQPHGALTRVSSVSQPGVRPACVEKLLSSGAFSAGCIPCGTSKILGSTDTILLGSNCIAGSESNGNVPYLQQNTHTLPHNHTDLNSSTEEPWRKQLSNSAQGLHKSQSSCLSGPNEEQPLFSTGSAQYHQATSTGIKKANEHLTLPSNSVPQGDADSHLSCHTATSGGQQGIMFTKESKPSKNRSLVPETSRHTGDTSNGCADVKGLSNHVHQLIADAVSSPNHGDSPNLLIADNPQLSALLIGKANGNVGTGTCDKVNNIHPAVHTKTDHSVASSPSSAISTATPSPKSTEQRSINSVTSLNSPHSGLHTVNGEGLGKSQSSTKVDLPLASHRSTSQILPSMSVSICPSSTEVLKACRNPGKNGLSNSCILLDKCPPPRPPTSPYPPLPKDKLNPPTPSIYLENKRDAFFPPLHQFCTNPKNPVTVIRGLAGALKLDLGLFSTKTLVEANNEHMVEVRTQLLQPADENWDPTGTKKIWRCESNRSHTTIAKYAQYQASSFQESLREENEKRTQHKDHSDNESTSSENSGRRRKGPFKTIKFGTNIDLSDNKKWKLQLHELTKLPAFARVVSAGNLLTHVGHTILGMNTVQLYMKVPGSRTPGHQENNNFCSVNINIGPGDCEWFVVPEDYWGVLNDFCEKNNLNFLMSSWWPNLEDLYEANVPVYRFIQRPGDLVWINAGTVHWVQAVGWCNNIAWNVGPLTACQYKLAVERYEWNKLKSVKSPVPMVHLSWNMARNIKVSDPKLFEMIK

SEQ ID NO: 14003 - protein, 1079 aa, Homo Sapiens
MKSCAVSLTTAAVAFGDEAKKMAEGKASRESEEESVSLTVEEREALGGMDSRLFGFVRLHEDGARTKTLLGKAVRCYESLILKAEGKVESDFFCQLGHFNLLLEDYSKALSAYQRYYSLQADYWKNAAFLYGLGLVYFYYNAFHWAIKAFQDVLYVDPSFCRAKEIHLRLGLMFKVNTDYKSSLKHFQLALIDCNPCTLSNAEIQFHIAHLYETQRKYHSAKEAYEQLLQTENLPAQVKATVLQQLGWMHHNMDLVGDKATKESYAIQYLQKSLEADPNSGQSWYFLGRCYSSIGKVQDAFISYRQSIDKSEASADTWCSIGVLYQQQNQPMDALQAYICAVQLDHGHAAAWMDLGTLYESCNQPQDAIKCYLNAARSKRCSNTSTLAARIKFLQNGSDNWNGGQSLSHHPVQQVYSLCLTPQKLQHLEQLRANRDNLNPAQKHQLEQLESQFVLMQQMRHKEVAQVRTTGIHNGAITDSSLPTNSVSNRQPHGALTRVSSVSQPGVRPACVEKLLSSGAFSAGCIPCGTSKILGSTDTILLGSNCIAGSESNGNVPYLQQNTHTLPHNHTDLNSSTEEPWRKQLSNSAQGLHKSQSSCLSGPNEEQPLFSTGSAQYHQATSTGIKKANEHLTLPSNSVPQGDADSHLSCHTATSGGQQGIMFTKESKPSKNRSLVPETSRHTGDTSNGCADVKGLSNHVHQLIADAVSSPNHGDSPNLLIADNPQLSALLIGKANGNVGTGTCDKVNNIHPAVHTKTDHSVASSPSSAISTATPSPKSTEQRSINSVTSLNSPHSGLHTVNGEGLGKSQSSTKVDLPLASHRSTSQILPSMSVSICPSSTEVLKACRNPGKNGLSNSCILLDKCPPPRPPTSPYPPLPKDKLNPPTPSIYLENKRDAFFPPLHQFCTNPKNPVTVIRGLAGALKLDLGLFSTKTLVEANNEHMVEVRTQLLQPADENWDPTGTKKIWRCESNRSHTTIAKYAQYQASSFQESLRAGMQWCDLSSLQPPPPGFKRFSHLSLPNSWNYRHLPSCPTNFCIFVETGFHHVGQACLELLTSGGLLASASQSAGITGVSHHAR

SEQ ID NO: 14004 - protein, 1347 aa, Homo Sapiens
MKSCAVSLTTAAVAFGDEAKKMAEGKASRESEEESVSLTVEEREALGGMDSRLFGFVRLHEDGARTKTLLGKAVRCYESLILKAEGKVESDFFCQLGHFNLLLEDYSKALSAYQRYYSLQADYWKNAAFLYGLGLVYFYYNAFHWAIKAFQDVLYVDPSFCRAKEIHLRLGLMFKVNTDYKSSLKHFQLALIDCNPCTLSNAEIQFHIAHLYETQRKYHSAKEAYEQLLQTENLPAQVKATVLQQLGWMHHNMDLVGDKATKESYAIQYLQKSLEADPNSGQSWYFLGRCYSSIGKVQDAFISYRQSIDKSEASADTWCSIGVLYQQQNQPMDALQAYICAVQLDHGHAAAWMDLGTLYESCNQPQDAIKCYLNAARSKRCSNTSTLAARIKFLQNGSDNWNGGQSLSHHPVQQVYSLCLTPQKLQHLEQLRANRDNLNPAQKHQLEQLESQFVLMQQMRHKEVAQVRTTGIHNGAITDSSLPTNSVSNRQPHGALTRVSSVSQPGVRPACVEKLLSSGAFSAGCIPCGTSKILGSTDTILLGSNCIAGSESNGNVPYLQQNTHTLPHNHTDLNSSTEEPWRKQLSNSAQGLHKSQSSCLSGPNEEQPLFSTGSAQYHQATSTGIKKANEHLTLPSNSVPQGDADSHLSCHTATSGGQQGIMFTKESKPSKNRSLVPETSRHTGDTSNGCADVKGLSNHVHQLIADAVSSPNHGDSPNLLIADNPQLSALLIGKANGNVGTGTCDKVNNIHPAVHTKTDHSVASSPSSAISTATPSPKSTEQRSINSVTSLNSPHSGLHTVNGEGLGKSQSSTKVDLPLASHRSTSQILPSMSVSICPSSTEVLKACRNPGKNGLSNSCILLDKCPPPRPPTSPYPPLPKDKLNPPTPSIYLENKRDAFFPPLHQFCTNPKNPVTVIRGLAGALKLDLGLFSTKTLVEANNEHMVEVRTQLLQPADENWDPTGTKKIWRCESNRSHTTIAKYAQYQASSFQESLREENEKRTQHKDHSDNESTSSENSGRRRKGPFKTIKFGTNIDLSDNKKWKLQLHELTKLPAFARVVSAGNLLTHVGHTILGMNTVQLYMKVPGSRTPGHQENNNFCSVNINIGPGDCEWFVVPEDYWGVLNDFCEKNNLNFLMSSWWPNLEDLYEANVPVYRFIQRPGDLVWINAGTVHWVQAVGWCNNIAWNVGPLTACQYKLAVERYEWNKLKSVKSPVPMVHLSWNMARNIKVSDPKLFEMIKYCLLKILKQYQTLREALVAAGKEVIWHGRTNDEPAHYCSICEVEVFNLLFVTNESNTQKTYIVHCHDCARKTSKSLENFVVLEQYKMEDLIQVYDQFTLALSLSSSS

SEQ ID NO: 14005 - protein, 1392 aa, Homo Sapiens
MKSCAVSLTTAAVAFGDEAKKMAEGKASRESEEESVSLTVEEREALGGMDSRLFGFVRLHEDGARTKTLLGKAVRCYESLILKAEGKVESDFFCQLGHFNLLLEDYSKALSAYQRYYSLQADYWKNAAFLYGLGLVYFYYNAFHWAIKAFQDVLYVDPSFCRAKEIHLRLGLMFKVNTDYKSSLKHFQLALIDCNPCTLSNAEIQFHIAHLYETQRKYHSAKEAYEQLLQTENLPAQVKATVLQQLGWMHHNMDLVGDKATKESYAIQYLQKSLEADPNSGQSWYFLGRCYSSIGKVQDAFISYRQSIDKSEASADTWCSIGVLYQQQNQPMDALQAYICAVQLDHGHAAAWMDLGTLYESCNQPQDAIKCYLNAARSKRCSNTSTLAARIKFLQAQLCNLPQSSLQNKTKLLPSIEEAWSLPIPAELTSRQGAMNTAQQNGSDNWNGGQSLSHHPVQQVYSLCLTPQKLQHLEQLRANRDNLNPAQKHQLEQLESQFVLMQQMRHKEVAQVRTTGIHNGAITDSSLPTNSVSNRQPHGALTRVSSVSQPGVRPACVEKLLSSGAFSAGCIPCGTSKILGSTDTILLGSNCIAGSESNGNVPYLQQNTHTLPHNHTDLNSSTEEPWRKQLSNSAQGLHKSQSSCLSGPNEEQPLFSTGSAQYHQATSTGIKKANEHLTLPSNSVPQGDADSHLSCHTATSGGQQGIMFTKESKPSKNRSLVPETSRHTGDTSNGCADVKGLSNHVHQLIADAVSSPNHGDSPNLLIADNPQLSALLIGKANGNVGTGTCDKVNNIHPAVHTKTDHSVASSPSSAISTATPSPKSTEQRSINSVTSLNSPHSGLHTVNGEGLGKSQSSTKVDLPLASHRSTSQILPSMSVSICPSSTEVLKACRNPGKNGLSNSCILLDKCPPPRPPTSPYPPLPKDKLNPPTPSIYLENKRDAFFPPLHQFCTNPKNPVTVIRGLAGALKLDLGLFSTKTLVEANNEHMVEVRTQLLQPADENWDPTGTKKIWRCESNRSHTTIAKYAQYQASSFQESLREENEKRTQHKDHSDNESTSSENSGRRRKGPFKTIKFGTNIDLSDNKKWKLQLHELTKLPAFARVVSAGNLLTHVGHTILGMNTVQLYMKVPGSRTPGHQENNNFCSVNINIGPGDCEWFVVPEDYWGVLNDFCEKNNLNFLMSSWWPNLEDLYEANVPVYRFIQRPGDLVWINAGTVHWVQAVGWCNNIAWNVGPLTACQYKLAVERYEWNKLKSVKSPVPMVHLSWNMARNIKVSDPKLFEMIKYCLLKILKQYQTLREALVAAGKEVIWHGRTNDEPAHYCSICEVEVFNLLFVTNESNTQKTYIVHCHDCARKTSKSLENFVVLEQYKMEDLIQVYDQFTLALSLSSSS

SEQ ID NO: 14006 - protein, 1389 aa, Homo Sapiens
MKSCAVSLTTAAVAFGDEAKKMAEGKASRESEEESVSLTVEEREALGGMDSRLFGFVRLHEDGARTKTLLGKAVRCYESLILKAEGKVESDFFCQLGHFNLLLEDYSKALSAYQRYYSLQADYWKNAAFLYGLGLVYFYYNAFHWAIKAFQDVLYVDPSFCRAKEIHLRLGLMFKVNTDYKSSLKHFQLALIDCNPCTLSNAEIQFHIAHLYETQRKYHSAKEAYEQLLQTENLPAQVKATVLQQLGWMHHNMDLVGDKATKESYAIQYLQKSLEADPNSGQSWYFLGSVLYQQQNQPMDALQAYICAVQLDHGHAAAWMDLGTLYESCNQPQDAIKCYLNAARSKRCSNTSTLAARIKFLQAQLCNLPQSSLQNKTKLLPSIEEAWSLPIPAELTSRQGAMNTAQQQSLSLHMITSSQVEGLSSPAKKKRTSSPTKNGSDNWNGGQSLSHHPVQQVYSLCLTPQKLQHLEQLRANRDNLNPAQKHQLEQLESQFVLMQQMRHKEVAQVRTTGIHNGAITDSSLPTNSVSNRQPHGALTRVSSVSQPGVRPACVEKLLSSGAFSAGCIPCGTSKILGSTDTILLGSNCIAGSESNGNVPYLQQNTHTLPHNHTDLNSSTEEPWRKQLSNSAQGLHKSQSSCLSGPNEEQPLFSTGSAQYHQATSTGIKKANEHLTLPSNSVPQGDADSHLSCHTATSGGQQGIMFTKESKPSKNRSLVPETSRHTGDTSNGCADVKGLSNHVHQLIADAVSSPNHGDSPNLLIADNPQLSALLIGKANGNVGTGTCDKVNNIHPAVHTKTDHSVASSPSSAISTATPSPKSTEQRSINSVTSLNSPHSGLHTVNGEGLGKSQSSTKVDLPLASHRSTSQILPSMSVSICPSSTEVLKACRNPGKNGLSNSCILLDKCPPPRPPTSPYPPLPKDKLNPPTPSIYLENKRDAFFPPLHQFCTNPKNPVTVIRGLAGALKLDLGLFSTKTLVEANNEHMVEVRTQLLQPADENWDPTGTKKIWRCESNRSHTTIAKYAQYQASSFQESLREENEKRTQHKDHSDNESTSSENSGRRRKGPFKTIKFGTNIDLSDNKKWKLQLHELTKLPAFARVVSAGNLLTHVGHTILGMNTVQLYMKVPGSRTPGHQENNNFCSVNINIGPGDCEWFVVPEDYWGVLNDFCEKNNLNFLMSSWWPNLEDLYEANVPVYRFIQRPGDLVWINAGTVHWVQAVGWCNNIAWNVGPLTACQYKLAVERYEWNKLKSVKSPVPMVHLSWNMARNIKVSDPKLFEMIKYCLLKILKQYQTLREALVAAGKEVIWHGRTNDEPAHYCSICEVEVFNLLFVTNESNTQKTYIVHCHDCARKTSKSLENFVVLEQYKMEDLIQVYDQFTLALSLSSSS

SEQ ID NO: 14007 - protein, 1335 aa, Homo Sapiens
MKSCAVSLTTAAVAFGDEAKKMAEGKASRESEEESVSLTVEEREALGGMDSRLFGFVRLHEDGARTKTLLGKAVRCYESLILKAEGKVESDFFCQLGHFNLLLEDYSKALSAYQRYYSLQADYWKNAAFLYGLGLVYFYYNAFHWAIKAFQDVLYVDPSFCRAKEIHLRLGLMFKVNTDYKSSLKHFQLALIDCNPCTLSNAEIQFHIAHLYETQRKYHSAKEAYEQLLQTENLPAQVKATVLQQLGWMHHNMDLVGDKATKESYAIQYLQKSLEADPNSGQSWYFLGRCYSSIGKVQDAFISYRQSIDKSEASADTWCSIGVLYQQQNQPMDALQAYICAVQLDHGHAAAWMDLGTLYESCNQPQDAIKCYLNAARSKRCSNTSTLAARIKFLQAQLCNLPQSSLQNKTKLLPSIEEAWSLPIPAELTSRQGAMNTAQQNGSDNWNGGQSLSHHPVQQVYSLCLTPQKLQHLEQLRANRDNLNPAQKHQLEQLESQFVLMQQMRHKEVAQVRTTGIHNGAITDSSLPTNSVSNRQPHGALTRVSSVSQPGVRPACVEKLLSSGAFSAGCIPCGTSKILGSTDTILLGSNCIAGSESNGNVPYLQQNTHTLPHNHTDLNSSTEEPWRKQLSNSAQGLHKSQSSCLSGPNEEQPLFSTGSAQYHQATSTGIKKANEHLTLPSNSVPQGDADSHLSCHTATSGGQQGIMFTKESKPSKNRSLVPETSRHTGDTSNGCADVKGLSNHVHQLIADAVSSPNHGDSPNLLIADNPQLSALLIGKANGNVGTGTCDKVNNIHPAVHTKTDHSVASSPSSAISTATPSPKSTEQRSINSVTSLNSPHSGLHTVNGEGLGKSQSSTKVDLPLASHRSTSQILPSMSVSICPSSTEVLKACRNPGKNGLSNSCILLDKCPPPRPPTSPYPPLPKDKLNPPTPSIYLENKRDAFFPPLHQFCTNPKNPVTVIRGLAGALKLDLGLFSTKTLVEANNEHMVEVRTQLLQPADENWDPTGTKKIWRCESNRSHTTIAKYAQYQASSFQESLREENEKRTQHKDHSDNESTSSENSGRRRKGPFKTIKFGTNIDLSDNKKWKLQLHELTKLPAFARVVSAGNLLTHVGHTILGMNTVQLYMKVPGSRTPGHQENNNFCSVNINIGPGDCEWFVVPEDYWGVLNDFCEKNNLNFLMSSWWPNLEDLYEANVPVYRFIQRPGDLVWINAGTVHWVQAVGWCNNIAWNVGPLTACQYKLAVERYEWNKLKSVKSPVPMVHLSWNMARNIKVSDPKLFEMIKYCLLKILKQYQTLREALVAAGKEVIWHGRTNDEPAHYCSICEALSLSSSS

SEQ ID NO: 14008 - protein, 1444 aa, Homo Sapiens
MKSCAVSLTTAAVAFGDEAKKMAEGKASRESEEESVSLTVEEREALGGMDSRLFGFVRLHEDGARTKTLLGKAVRCYESLILKAEGKVESDFFCQLGHFNLLLEDYSKALSAYQRYYSLQADYWKNAAFLYGLGLVYFYYNAFHWAIKAFQDVLYVDPSFCRAKEIHLRLGLMFKVNTDYKSSLKHFQLALIDCNPCTLSNAEIQFHIAHLYETQRKYHSAKEAYEQLLQTENLPAQVKATVLQQLGWMHHNMDLVGDKATKESYAIQYLQKSLEADPNSGQSWYFLGRCYSSIGKVQDAFISYRQSIDKSEASADTWCSIGVLYQQQNQPMDALQAYICAVQLDHGHAAAWMDLGTLYESCNQPQDAIKCYLNAARSKRCSNTSTLAARIKFLQAQLCNLPQSSLQNKTKLLPSIEEAWSLPIPAELTSRQGAMNTAQQAYRAHDPNTEHVLNHSQTPILQQSLSLHMITSSQVEGLSSPAKKKRTSSPTKNGSDNWNGGQSLSHHPVQQVYSLCLTPQKLQHLEQLRANRDNLNPAQKHQLEQLESQFVLMQQMRHKEVAQVRTTGIHNGAITDSSLPTNSVSNRQPHGALTRVSSVSQPGVRPACVEKLLSSGAFSAGCIPCGTSKILGSTDTILLGSNCIAGSESNGNVPYLQQNTHTLPHNHTDLNSSTEEPWRKQLSNSAQGLHKSQSSCLSGPNEEQPLFSTGSAQYHQATSTGIKKANEHLTLPSNSVPQGDADSHLSCHTATSGGQQGIMFTKESKPSKNRSLVPETSRHTGDTSNGCADVKGLSNHVHQLIADAVSSPNHGDSPNLLIADNPQLSALLIGKANGNVGTGTCDKVNNIHPAVHTKTDHSVASSPSSAISTATPSPKSTEQRSINSVTSLNSPHSGLHTVNGEGLGKSQSSTKVDLPLASHRSTSQILPSMSVSICPSSTEVLKACRNPGKNGLSNSCILLDKCPPPRPPTSPYPPLPKDKLNPPTPSIYLENKRDAFFPPLHQFCTNPKNPVTVIRGLAGALKLDLGLFSTKTLVEANNEHMVEVRTQLLQPADENWDPTGTKKIWRCESNRSHTTIAKYAQYQASSFQESLREENEKRTQHKDHSDNESTSSENSGRRRKGPFKTIKFGTNIDLSDNKKWKLQLHELTKLPAFARVVSAGNLLTHVGHTILGMNTVQLYMKVPGSRTPGHQENNNFCSVNINIGPGDCEWFVVPEDYWGVLNDFCEKNNLNFLMSSWWPNLEDLYEANVPVYRFIQRPGDLVWINAGTVHWVQAVGWCNNIAWNVGPLTACQYKLAVERYEWNKLKSVKSPVPMVHLSWNMARNIKVSDPKLFEMIKYCLLKILKQYQTLREALVAAGKEVIWHGRTNDEPAHYCSICEVEVFNLLFVTNESNTQKTYIVHCHDCARKTSKSLENFVVLEQYKMEDLIQVYDQFTLALSLSSSS

SEQ ID NO: 14009 - protein, 1363 aa, Homo Sapiens
MKSCAVSLTTAAVAFGDEAKKMAEGKASRESEEESVSLTVEEREALGGMDSRLFGFVRLHEDGARTKTLLGKAVRCYESLILKAEGKVESDFFCQLGHFNLLLEDYSKALSAYQRYYSLQADYWKNAAFLYGLGLVYFYYNAFHWAIKAFQDVLYVDPSFCRAKEIHLRLGLMFKVNTDYKSSLKHFQLALIDCNPCTLSNAEIQFHIAHLYETQRKYHSAKEAYEQLLQTENLPAQVKATVLQQLGWMHHNMDLVGDKATKESYAIQYLQKSLEADPNSGQSWYFLGRCYSSIGKVQDAFISYRQSIDKSEASADTWCSIGVLYQQQNQPMDALQAYICAVQLDHGHAAAWMDLGTLYESCNQPQDAIKCYLNAARSKRCSNTSTLAARIKFLQNGSDNWNGGQSLSHHPVQQVYSLCLTPQKLQHLEQLRANRDNLNPAQKHQLEQLESQFVLMQQMRHKEVAQVRTTGIHNGAITDSSLPTNSVSNRQPHGALTRVSSVSQPGVRPACVEKLLSSGAFSAGCIPCGTSKILGSTDTILLGSNCIAGSESNGNVPYLQQNTHTLPHNHTDLNSSTEEPWRKQLSNSAQAYLGHLTGFIQDNCNKGLHKSQSSCLSGPNEEQPLFSTGSAQYHQATSTGIKKANEHLTLPSNSVPQGDADSHLSCHTATSGGQQGIMFTKESKPSKNRSLVPETSRHTGDTSNGCADVKGLSNHVHQLIADAVSSPNHGDSPNLLIADNPQLSALLIGKANGNVGTGTCDKVNNIHPAVHTKTDHSVASSPSSAISTATPSPKSTEQRSINSVTSLNSPHSGLHTVNGEGLGKSQSSTKVDLPLASHRSTSQILPSMSVSICPSSTEVLKACRNPGKNGLSNSCILLDKCPPPRPPTSPYPPLPKDKLNPPTPSIYLENKRDAFFPPLHQFCTNPKNPVTVIRGLAGALKLDLGLFSTKTLVEANNEHMVEVRTQLLQPADENWDPTGTKKIWRCESNRSHTTIAKYAQYQASSFQESLREENEKRTQHKDHSDNESTSSENSGRRRKGPFKTIKFGTNIDLSDNKKWKLQLHELTKLPAFARVVSAGNLLTHVGHTILGMNTVQLYMKVPGSRTPGHQENNNFCSVNINIGPGDCEWFVVPEDYWGVLNDFCEKNNLNFLMSSWWPNLEDLYEANVPVYRFIQRPGDLVWINAGTVHWVQAVGWCNNIAWNVGPLTACQYKLAVERYEWNKLKSVKSPVPMVHLSWNMARNIKVSDPKLFEMIKYCLLKILKQYQTLREALVAAGKEVIWHGRTNDEPAHYCSICEVEVFNLLFVTNESNTQKTYIVHCHDCARKTSKSLENFVVLEQYKMEDLIQVYDQFTLALSLSSSS

SEQ ID NO: 14010 - protein, 1211 aa, Homo Sapiens
MKSCAVSLTTAAVAFGDEAKKMAEGKASRESEEESVSLTVEEREALGGMDSRLFGFVRLHEDGARTKTLLGKAVRCYESLILKAEGKVESDFFCQLGHFNLLLEDYSKALSAYQRYYSLQADYWKNAAFLYGLGLVYFYYNAFHWAIKAFQDVLYVDPSFCRAKEIHLRLGLMFKVNTDYKSSLKHFQLALIDCNPCTLSNAEIQFHIAHLYETQRKYHSAKEAYEQLLQTENLPAQVKATVLQQLGWMHHNMDLVGDKATKESYAIQYLQKSLEADPNSGQSWYFLGRCYSSIGKVQDAFISYRQSIDKSEASADTWCSIGVLYQQQNQPMDALQAYICAVQLDHGHAAAWMDLGTLYESCNQPQDAIKCYLNAARSKRCSNTSTLAARIKFLQAQLCNLPQSSLQNKTKLLPSIEEAWSLPIPAELTSRQGAMNTAQQNGSDNWNGGQSLSHHPVQQVYSLCLTPQKLQHLEQLRANRDNLNPAQKHQLEQLESQFVLMQQMRHKEVAQGLHKSQSSCLSGPNEEQPLFSTGSAQYHQATSTGIKKANEHLTLPSNSVPQGDADSHLSCHTATSGGQQGIMFTKESKPSKNRSLVPETSRHTGDTSNGCADVKGLSNHVHQLIADAVSSPNHGDSPNLLIADNPQLSALLIGKANGNVGTGTCDKVNNIHPAVHTKTDHSVASSPSSAISTATPSPKSTEQRSINSVTSLNSPHSGLHTVNGEGLGKSQSSTKVDLPLASHRSTSQILPSMSVSICPSSTEVLKACRNPGKNGLSNSCILLDKCPPPRPPTSPYPPLPKDKLNPPTPSIYLENKRDAFFPPLHQFCTNPKNPVTVIRGLAGALKLDLGLFSTKTLVEANNEHMVEVRTQLLQPADENWDPTGTKKIWRCESNRSHTTIAKYAQYQASSFQESLREENEKRTQHKDHSDNESTSSENSGRRRKGPFKTIKFGTNIDLSDNKKWKLQLHELTKLPAFARVVSAGNLLTHVGHTILGMNTVQLYMKVPGSRTPGHQENNNFCSVNINIGPGDCEWFVVPEDYWGVLNDFCEKNNLNFLMSSWWPNLEDLYEANVPVYRFIQRPGDLVWINAGTVHWVQAVGWCNNIAWNVGPLTACQYKLAVERYEWNKLKSVKSPVPMVHLSWNMARNIKVSDPKLFEMIKYCLLKILKQYQTLREALVAAGKEVIWHGRTNDEPAHYCSICEALSLSSSS

SEQ ID NO: 14011 - protein, 1399 aa, Homo Sapiens
MKSCAVSLTTAAVAFGDEAKKMAEGKASRESEEESVSLTVEEREALGGMDSRLFGFVRLHEDGARTKTLLGKAVRCYESLILKAEGKVESDFFCQLGHFNLLLEDYSKALSAYQRYYSLQADYWKNAAFLYGLGLVYFYYNAFHWAIKAFQDVLYVDPSFCRAKEIHLRLGLMFKVNTDYKSSLKHFQLALIDCNPCTLSNAEIQFHIAHLYETQRKYHSAKEAYEQLLQTENLPAQVKATVLQQLGWMHHNMDLVGDKATKESYAIQYLQKSLEADPNSGQSWYFLGRCYSSIGKVQDAFISYRQSIDKSEASADTWCSIGVLYQQQNQPMDALQAYICAVQLDHGHAAAWMDLGTLYESCNQPQDAIKCYLNAARSKRCSNTSTLAARIKFLQAYRAHDPNTEHVLNHSQTPILQQSLSLHMITSSQVEGLSSPAKKKRTSSPTKNGSDNWNGGQSLSHHPVQQVYSLCLTPQKLQHLEQLRANRDNLNPAQKHQLEQLESQFVLMQQMRHKEVAQVRTTGIHNGAITDSSLPTNSVSNRQPHGALTRVSSVSQPGVRPACVEKLLSSGAFSAGCIPCGTSKILGSTDTILLGSNCIAGSESNGNVPYLQQNTHTLPHNHTDLNSSTEEPWRKQLSNSAQGLHKSQSSCLSGPNEEQPLFSTGSAQYHQATSTGIKKANEHLTLPSNSVPQGDADSHLSCHTATSGGQQGIMFTKESKPSKNRSLVPETSRHTGDTSNGCADVKGLSNHVHQLIADAVSSPNHGDSPNLLIADNPQLSALLIGKANGNVGTGTCDKVNNIHPAVHTKTDHSVASSPSSAISTATPSPKSTEQRSINSVTSLNSPHSGLHTVNGEGLGKSQSSTKVDLPLASHRSTSQILPSMSVSICPSSTEVLKACRNPGKNGLSNSCILLDKCPPPRPPTSPYPPLPKDKLNPPTPSIYLENKRDAFFPPLHQFCTNPKNPVTVIRGLAGALKLDLGLFSTKTLVEANNEHMVEVRTQLLQPADENWDPTGTKKIWRCESNRSHTTIAKYAQYQASSFQESLREENEKRTQHKDHSDNESTSSENSGRRRKGPFKTIKFGTNIDLSDNKKWKLQLHELTKLPAFARVVSAGNLLTHVGHTILGMNTVQLYMKVPGSRTPGHQENNNFCSVNINIGPGDCEWFVVPEDYWGVLNDFCEKNNLNFLMSSWWPNLEDLYEANVPVYRFIQRPGDLVWINAGTVHWVQAVGWCNNIAWNVGPLTACQYKLAVERYEWNKLKSVKSPVPMVHLSWNMARNIKVSDPKLFEMIKYCLLKILKQYQTLREALVAAGKEVIWHGRTNDEPAHYCSICEVEVFNLLFVTNESNTQKTYIVHCHDCARKTSKSLENFVVLEQYKMEDLIQVYDQFTLALSLSSSS

SEQ ID NO: 14012 - protein, 1367 aa, Homo Sapiens
MKSCAVSLTTAAVAFGDEAKKMAEGKASRESEEESVSLTVEEREALGGMDSRLFGFVRLHEDGARTKTLLGKAVRCYESLILKAEGKVESDFFCQLGHFNLLLEDYSKALSAYQRYYSLQADYWKNAAFLYGLGLVYFYYNAFHWAIKAFQDVLYVDPSFCRAKEIHLRLGLMFKVNTDYKSSLKHFQLALIDCNPCTLSNAEIQFHIAHLYETQRKYHSAKEAYEQLLQTENLPAQVKATVLQQLGWMHHNMDLVGDKATKESYAIQYLQKSLEADPNSGQSWYFLGRCYSSIGKVQDAFISYRQSIDKSEASADTWCSIGVLYQQQNQPMDALQAYICAVQLDHGHAAAWMDLGTLYESCNQPQDAIKCYLNAARSKRCSNTSTLAARIKFLQAQLCNLPQSSLQNKTKLLPSIEEAWSLPIPAELTSRQGAMNTAQQNGSDNWNGGQSLSHHPVQQVYSLCLTPQKLQHLEQLRANRDNLNPAQKHQLEQLESQFVLMQQMRHKEVAQVRTTGIHNGAITDSSLPTNSVSNRQPHGALTRVSSVSQPGVRPACVEKLLSSGAFSAGCIPCGTSKILGSTDTILLGSNCIAGSESNGNVPYLQQNTHTLPHNHTDLNSSTEEPWRKQLSNSAQGLHKSQSSCLSGPNEEQPLFSTGSAQYHQATSTGIKKANEHLTLPSNSVPQGDADSHLSCHTATSGGQQGIMFTKESKPSKNRSLVPETSRHTGDTSNGCADVKGLSNHVHQLIADAVSSPNHGDSPNLLIADNPQLSALLIGKANGNVGTGTCDKVNNIHPAVHTKTDHSVASSPSSAISTATPSPKSTEQRSINSVTSLNSPHSGLHTVNGEGLGKSQSSTKVDLPLASHRSTSQILPSMSVSICPSSTEVLKACRNPGKNGLSNSCILLDKCPPPRPPTSPYPPLPKDKLNPPTPSIYLENKRDAFFPPLHQFCTNPKNPVTVIRGLAGALKLDLGLFSTKTLVEANNEHMVEVRTQLLQPADENWDPTGTKKIWRCESNRSHTTIAKYAQYQASSFQESLREENEKRTQHKDHSDNESTSSEKWKLQLHELTKLPAFARVVSAGNLLTHVGHTILGMNTVQLYMKVPGSRTPGHQENNNFCSVNINIGPGDCEWFVVPEDYWGVLNDFCEKNNLNFLMSSWWPNLEDLYEANVPVYRFIQRPGDLVWINAGTVHWVQAVGWCNNIAWNVGPLTACQYKLAVERYEWNKLKSVKSPVPMVHLSWNMARNIKVSDPKLFEMIKYCLLKILKQYQTLREALVAAGKEVIWHGRTNDEPAHYCSICEVEVFNLLFVTNESNTQKTYIVHCHDCARKTSKSLENFVVLEQYKMEDLIQVYDQFTLALSLSSSS

SEQ ID NO: 14013 - protein, 207 aa, Homo Sapiens
MKSCAVSLTTAAVAFGDEAKKMAEGKASRESEEESVSLTVEEREALGGMDSRLFGFVRLHEDGARTKTLLGKAVRCYESLILKAEGKVESDFFCQLGHFNLLLEDYSKALSAYQRYYSLQADYWKNAAFLYGLGLVYFYYNAFHWAIKAFQDVLYVDPSFCRAKEIHLRLGLMFKVNTDYKSSLKHFQLALIDCNPCTLSNAESKYF

SEQ ID NO: 14014 - protein, 1264 aa, Homo Sapiens
MKSCAVSLTTAAVAFGDEAKKMAEGKASRESEEESVSLTVEEREALGGMDSRLFGFVRLHEDGARTKTLLGKNAAFLYGLGLVYFYYNAFHWAIKAFQDVLYVDPSFCRAKEIHLRLGLMFKVNTDYKSSLKRKYHSAKEAYEQLLQTENLPAQVKATVLQQLGWMHHNMDLVGDKATKESYAIQYLQKSLEADPNSGQSWYFLGRCYSSIGKVQDAFISYRQSIDKSEASADTWCSIGVLYQQQNQPMDALQAYICAVQLDHGHAAAWMDLGTLYESCNQPQDAIKCYLNAARSKRCSNTSTLAARIKFLQNGSDNWNGGQSLSHHPVQQVYSLCLTPQKLQHLEQLRANRDNLNPAQKHQLEQLESQFVLMQQMRHKEVAQVRTTGIHNGAITDSSLPTNSVSNRQPHGALTRVSSVSQPGVRPACVEKLLSSGAFSAGCIPCGTSKILGSTDTILLGSNCIAGSESNGNVPYLQQNTHTLPHNHTDLNSSTEEPWRKQLSNSAQGLHKSQSSCLSGPNEEQPLFSTGSAQYHQATSTGIKKANEHLTLPSNSVPQGDADSHLSCHTATSGGQQGIMFTKESKPSKNRSLVPETSRHTGDTSNGCADVKGLSNHVHQLIADAVSSPNHGDSPNLLIADNPQLSALLIGKANGNVGTGTCDKVNNIHPAVHTKTDHSVASSPSSAISTATPSPKSTEQRSINSVTSLNSPHSGLHTVNGEGLGKSQSSTKVDLPLASHRSTSQILPSMSVSICPSSTEVLKACRNPGKNGLSNSCILLDKCPPPRPPTSPYPPLPKDKLNPPTPSIYLENKRDAFFPPLHQFCTNPKNPVTVIRGLAGALKLDLGLFSTKTLVEANNEHMVEVRTQLLQPADENWDPTGTKKIWRCESNRSHTTIAKYAQYQASSFQESLREENEKRTQHKDHSDNESTSSENSGRRRKGPFKTIKFGTNIDLSDNKKWKLQLHELTKLPAFARVVSAGNLLTHVGHTILGMNTVQLYMKVPGSRTPGHQENNNFCSVNINIGPGDCEWFVVPEDYWGVLNDFCEKNNLNFLMSSWWPNLEDLYEANVPVYRFIQRPGDLVWINAGTVHWVQAVGWCNNIAWNVGPLTACQYKLAVERYEWNKLKSVKSPVPMVHLSWNMARNIKVSDPKLFEMIKYCLLKILKQYQTLREALVAAGKEVIWHGRTNDEPAHYCSICEVEVFNLLFVTNESNTQKTYIVHCHDCARKTSKSLENFVVLEQYKMEDLIQVYDQFTLALSLSSSS

SEQ ID NO: 14015 - protein, 190 aa, Homo Sapiens
MVEPLREKIRDLEKSFTQKYPPVKFLSEKDRKRILITGGAGFVGSHLTDKLMMDGHEVTVVDNFFTGRKRNVEHWIGHENFELINHDVVEPLYIEVDQIYHLASPASPPNYMYNPIKTLKTNTIGTLNMLGLAKRVGARLLLASTSEVYGDPEVHPQSEDYWGHVNPIGPRACYDEGKRVAETMCYAYMK

SEQ ID NO: 14016 - protein, 420 aa, Homo Sapiens
MVSKALLRLVSAVNRRRMKLLLGIALLAYVASVWGNFVNMRSIQENGELKIESKIEEMVEPLREKIRDLEKSFTQKYPPVKFLSEKDRKRILITGGAGFVGSHLTDKLMMDGHEVTVVDNFFTGRKRNVEHWIGHENFELINHDVVEPLYIEVDQIYHLASPASPPNYMYNPIKTLKTNTIGTLNMLGLAKRVGARLLLASTSEVYGDPEVHPQSEDYWGHVNPIGPRACYDEGKRVAETMCYAYMKQEGVEVRVARIFNTFGPRMHMNDGRVVSNFILQALQGEPLTVYGSGSQTRAFQYVSDLVNGLVALMNSNVSSPVNLGNPEEHTILEFAQLIKNLVGSGSEIQFLSEAQDDPQKRKPDIKKAKLMLGWEPVVPLEEGLNKAIHYFRKELEYQANNQYIPKPKPARIKKGRTRHS

SEQ ID NO: 14017 - protein, 425 aa, Homo Sapiens
MVSKALLRLVSAVNRRRMKLLLGIALLAYVASVWGNFVNMSFLLNRSIQENGELKIESKIEEMVEPLREKIRDLEKSFTQKYPPVKFLSEKDRKRILITGGAGFVGSHLTDKLMMDGHEVTVVDNFFTGRKRNVEHWIGHENFELINHDVVEPLYIEVDQIYHLASPASPPNYMYNPIKTLKTNTIGTLNMLGLAKRVGARLLLASTSEVYGDPEVHPQSEDYWGHVNPIGPRACYDEGKRVAETMCYAYMKQEGVEVRVARIFNTFGPRMHMNDGRVVSNFILQALQGEPLTVYGSGSQTRAFQYVSDLVNGLVALMNSNVSSPVNLGNPEEHTILEFAQLIKNLVGSGSEIQFLSEAQDDPQKRKPDIKKAKLMLGWEPVVPLEEGLNKAIHYFRKELEYQANNQYIPKPKPARIKKGRTRHS

SEQ ID NO: 14018 - protein, 171 aa, Homo Sapiens [sequence omitted]

SEQ ID NO: 14019 - protein, 52 aa, Homo Sapiens
MYNPIKTLKTNTIGTLNMLGLAKRVGARLLLASTSEVYGDPEVHPQSEDYWG

SEQ ID NO: 14020 - protein, 121 aa, Homo Sapiens
MYNPIKTLKTNTIGTLNMLGLAKRVGARLLLASTSEVYGDPEVHPQSEDYWGHVNPIGPRACYDEGKRVAETMCYAYMKQEGVEVRVARIFNTFGPRMHMNDGRVVSNFILQALQGEPLTV

SEQ ID NO: 14021 - protein, 134 aa, Homo Sapiens
MYNPIKTLKTNTIGTLNMLGLAKRVGARLLLASTSEVYGDPEVHPQSEDYWGHVNPIGPRACYDEGKRVAETMCYAYMKQEGVEVRVARIFNTFGPRMHMNDGRVVSNFILQALQGEPLTVYGSGSQTRAFQYV

SEQ ID NO: 14022 - protein, 252 aa, Homo Sapiens
MYNPIKTLKTNTIGTLNMLGLAKRVGARLLLASTSEVYGDPEVHPQSEDYWGHVNPIGPRACYDEGKRVAETMCYAYMKQEGVEVRVARIFNTFGPRMHMNDGRVVSNFILQALQGEPLTVYGSGSQTRAFQYVSDLVNGLVALMNSNVSSPVNLGNPEEHTILEFAQLIKNLVGSGSEIQFLSEAQDDPQKRKPDIKKAKLMLGWEPVVPLEEGLNKAIHYFRKELEYQANNQYIPKPKPARIKKGRTRHS

SEQ ID NO: 14023 - protein, 91 aa, Homo Sapiens
MGPGEGNCWFCWCLCPWLLSGSWVHLISGKSPSLTRPVMGGGGGVEMFLQFCLPWQNLDPGKGKQGRSPSEKGLCSPLTRSLAQATSAPRA

SEQ ID NO: 14024 - protein, 365 aa, Homo Sapiens
MPGGKKVAGGGSSGATPTSAAATAPSGVRRLETSEGTSAQRDEEPEEEGEEDLRDGGVPFFVNRGGLPVDEATWERMWKHVAKIHPDGEKVAQRIRGATDLPKIPIPSVPTFQPSTPVPERLEAVQRYIRELQYNHTGTQFFEIKKSRPLTGLMDLAKEMTKEALPIKCLEAVILGIYLTNSMPTLERFPISFKTYFSGNYFRHIVLGVNFAGRYGALGMSRREDLMYKPPAFRTLSELVLDFEAAYGRCWHVLKKVKLGQSVSHDPHSVEQIEWKHSVLDVERLGRDDFRKELERHARDMRLKIGKGTGPPSPTKDRKKDVSSPQRAQSSPHRRNSRSERRPSGDKKTSEPKAMPDLNGYQIRV

SEQ ID NO: 14025 - protein, 204 aa, Homo Sapiens
MPGGKKVAGGGSSGATPTSAAATAPSGVRRLETSEGTSAQRDEEPEEEGEEDLRDGGVPFFVNRGGLPVDEATWERMWKHVAKIHPDGEKVAQRIRGATDLPKIPIPSVPTFQPSTPVPERLEAVQRYIRELQYNHTGTQFFEIKKSRPLTGLMDLAKEMTKEALPIKCLEAVILGMYPSSPEGEGSGLLWASASCSESEGGVG

SEQ ID NO: 14026 - protein, 3396 aa, Homo Sapiens
MFINIKSILWMCSTLIVTHALHKVKVGKSPPVRGSLSGKVSLPCHFSTMPTLPPSYNTSEFLRIKWSKIEVDKNGKDLKETTVLVAQNGNIKIGQDYKGRVSVPTHPEAVGDASLTVVKLLASDAGLYRCDVMYGIEDTQDTVSLTVDGVVFHYRAATSRYTLNFEAAQKACLDVGAVIATPEQLFAAYEDGFEQCDAGWLADQTVRYPIRAPRVGCYGDKMGKAGVRTYGFRSPQETYDVYCYVDHLDGDVFHLTVPSKFTFEEAAKECENQDARLATVGELQAAWRNGFDQCDYGWLSDASVRHPVTVARAQCGGGLLGVRTLYRFENQTGFPPPDSRFDAYCFKPKEATTIDLSILAETASPSLSKEPQMVSDRTTPIIPLVDELPVIPTEFPPVGNIVSFEQKATVQPQAITDSLATKLPTPTGSTKKPWDMDDYSPSASGPLGKLDISEIKEEVLQSTTGVSHYATDSWDGVVEDKQTQESVTQIEQIEVGPLVTSMEILKHIPSKEFPVTETPLVTARMILESKTEKKMVSTVSELVTTGHYGFTLGEEDDEDRTLTVGSDESTLIFDQIPEVITVSKTSEDTIHTHLEDLESVSASTTVSPLIMPDNNGSSMDDWEERQTSGRITEEFLGKYLSTTPFPSQHRTEIELFPYSGDKILVEGISTVIYPSLQTEMTHRRERTETLIPEMRTDTYTDEIQEEITKSPFMGKTEEEVFSGMKLSTSLSEPIHVTESSVEMTKSFDFPTLITKLSAEPTEVRDMEEDFTATPGTTKYDENITTVLLAHGTLSVEAATVSKWSWDEDNTTSKPLESTEPSASSKLPPALLTTVGMNGKDKDIPSFTEDGADEFTLIPDSTQKQLEEVTDEDIAAHGKFTIRFQPTTSTGIAEKSTLRDSTTEEKVPPITSTEGQVYATMEGSALGEVEDVDLSKPVSTVPQFAHTSEVEGLAFVSYSSTQEPTTYVDSSHTIPLSVIPKTDWGVLVPSVPSEDEVLGEPSQDILVIDQTRLEATISPETMRTTKITEGTTQEEFPWKEQTAEKPVPALSSTAWTPKEAVTPLDEQEGDGSAYTVSEDELLTGSERVPVLETTPVGKIDHSVSYPPGAVTEHKVKTDEVVTLTPRIGPKVSLSPGPEQKYETEGSSTTGFTSSLSPFSTHITQLMEETTTEKTSLEDIDLGSGLFEKPKATELIEFSTIKVTVPSDITTAFSSVDRLHTTSAFKPSSAITKKPPLIDREPGEETTSDMVIIGESTSHVPPTTLEDIVAKETETDIDREYFTTSSPPATQPTRPPTVEDKEAFGPQALSTPQPPASTKFHPDINVYIIEVRENKTGRMSDLSVIGHPIDSESKEDEPCSEETDPVHDLMAEILPEFPDIIEIDLYHSEENEEEEEECANATDVTTTPSVQYINGKHLVTTVPKDPEAAEARRGQFESVAPSQNFSDSSESDTHPFVIAKTELSTAVQPNESTETTESLEVTWKPETYPETSEHFSGGEPDVFPTVPFHEEFESGTAKKGAESVTERDTEVGHQAHEHTEPVSLFPEESSGEIAIDQESQKIAFARATEVTFGEEVEKSTSVTYTPTIVPSSASAYVSEEEAVTLIGNPWPDDLLSTKESWVEATPRQVVELSGSSSIPITEGSGEAEEDEDTMFTMVTDLSQRNTTDTLITLDTSRIITESFFEVPATTIYPVSEQPSAKVVPTKFVSETDTSEWISSTTVEEKKRKEEEGTTGTASTFEVYSSTQRSDQLILPFELESPNVATSSDSGTRKSFMSLTTPTQSEREMTDSTPVFTETNTLENLGAQTTEHSSIHQPGVQEGLTTLPRSPASVFMEQGSGEAAADPETTTVSSFSLNVEYAIQAEKEVAGTLSPHVETTFSTEPTGLVLSTVMDRVVAENITQTSREIVISERLGEPNYGAEIRGFSTGFPLEEDFSGDFREYSTVSHPIAKEETVMMEGSGDAAFRDTQTSPSTVPTSVHISHISDSEGPSSTMVSTSAFPWEEFTSSAEGSGEQLVTVSSSVVPVLPSAVQKFSGTASSIIDEGLGEVGTVNEIDRRSTILPTAEVEGTKAPVEKEEVKVSGTVSTNFPQTIEPAKLWSRQEVNPVRQEIESETTSEEQIQEEKSFESPQNSPATEQTIFDSQTFTETELKTTDYSVLTTKKTYSDDKEMKEEDTSLVNMSTPDPDANGLESYTTLPEATEKSHFFLATALVTESIPAEHVVTDSPIKKEESTKHFPKGMRPTIQESDTELLFSGLGSGEEVLPTLPTESVNFTEVEQINNTLYPHTSQVESTSSDKIEDFNRMENVAKEVGPLVSQTDIFEGSGSVTSTTLIEILSDTGAEGPTVAPLPFSTDIGHPQNQTVRWAEEIQTSRPQTITEQDSNKNSSTAEINETTTSSTDFLARAYGFEMAKEFVTSAPKPSDLYYEPSGEGSGEVDIVDSFHTSATTQATRQESSTTFVSDGSLEKHPEVPSAKAVTADGFPTVSVMLPLHSEQNKSSPDPTSTLSNTVSYERSTDGSFQDRFREFEDSTLKPNRKKPTENIIIDLDKEDKDLILTITESTILEILPELTSDKNTIIDIDHTKPVYEDILGMQTDIDTEVPSEPHDSNDESNDDSTQVQEIYEAAVNLSLTEETFEGSADVLASYTQATHDESMTYEDRSQLDHMGFHFTTGIPAPSTETELDVLLPTATSLPIPRKSATVIPEIEGIKAEAKALDDMFESSTLSDGQAIADQSEIIPTLGQFERTQEEYEDKKHAGPSFQPEFSSGAEEALVDHTPYLSIATTHLMDQSVTEVPDVMEGSNPPYYTDTTLAVSTFAKLSSQTPSSPLTIYSGSEASGHTEIPQPSALPGIDVGSSVMSPQDSFKEIHVNIEATFKPSSEEYLHITEPPSLSPDTKLEPSEDDGKPELLEEMEASPTELIAVEGTEILQDFQNKTDGQVSGEAIKMFPTIKTPEAGTVITTADEIELEGATQWPHSTSASATYGVEAGVVPWLSPQTSERPTLSSSPEINPETQAALIRGQDSTIAASEQQVAARILDSNDQATVNPVEFNTEVATPPFSLLETSNETDFLIGINEESVEGTAIYLPGPDRCKMNPCLNGGTCYPTETSYVCTCVPGYSGDQCELDFDECHSNPCRNGATCVDGFNTFRCLCLPSYVGALCEQDTETCDYGWHKFQGQCYKYFAHRRTWDAAERECRLQGAHLTSILSHEEQMFVNRVGHDYQWIGLNDKMFEHDFRWTDGSTLQYENWRPNQPDSFFSAGEDCVVIIWHENGQWNDVPCNYHLTYTCKKGTVACGQPPVVENAKTFGKMKPRYEINSLIRYHCKDGFIQRHLPTIRCLGNGRWAIPKITCMNPSAYQRTYSMKYFKNSSSAKDNSINTSKHDHRWSRRWQESRR

SEQ ID NO: 14027 - protein, 2409 aa, Homo Sapiens
MFINIKSILWMCSTLIVTHALHKVKVGKSPPVRGSLSGKVSLPCHFSTMPTLPPSYNTSEFLRIKWSKIEVDKNGKDLKETTVLVAQNGNIKIGQDYKGRVSVPTHPEAVGDASLTVVKLLASDAGLYRCDVMYGIEDTQDTVSLTVDGVVFHYRAATSRYTLNFEAAQKACLDVGAVIATPEQLFAAYEDGFEQCDAGWLADQTVRYPIRAPRVGCYGDKMGKAGVRTYGFRSPQETYDVYCYVDHLDGDVFHLTVPSKFTFEEAAKECENQDARLATVGELQAAWRNGFDQCDYGWLSDASVRHPVTVARAQCGGGLLGVRTLYRFENQTGFPPPDSRFDAYCFKRRMSDLSVIGHPIDSESKEDEPCSEETDPVHDLMAEILPEFPDIIEIDLYHSEENEEEEEECANATDVTTTPSVQYINGKHLVTTVPKDPEAAEARRGQFESVAPSQNFSDSSESDTHPFVIAKTELSTAVQPNESTETTESLEVTWKPETYPETSEHFSGGEPDVFPTVPFHEEFESGTAKKGAESVTERDTEVGHQAHEHTEPVSLFPEESSGEIAIDQESQKIAFARATEVTFGEEVEKSTSVTYTPTIVPSSASAYVSEEEAVTLIGNPWPDDLLSTKESWVEATPRQVVELSGSSSIPITEGSGEAEEDEDTMFTMVTDLSQRNTTDTLITLDTSRIITESFFEVPATTIYPVSEQPSAKVVPTKFVSETDTSEWISSTTVEEKKRKEEEGTTGTASTFEVYSSTQRSDQLILPFELESPNVATSSDSGTRKSFMSLTTPTQSEREMTDSTPVFTETNTLENLGAQTTEHSSIHQPGVQEGLTTLPRSPASVFMEQGSGEAAADPETTTVSSFSLNVEYAIQAEKEVAGTLSPHVETTFSTEPTGLVLSTVMDRVVAENITQTSREIVISERLGEPNYGAEIRGFSTGFPLEEDFSGDFREYSTVSHPIAKEETVMMEGSGDAAFRDTQTSPSTVPTSVHISHISDSEGPSSTMVSTSAFPWEEFTSSAEGSGEQLVTVSSSVVPVLPSAVQKFSGTASSIIDEGLGEVGTVNEIDRRSTILPTAEVEGTKAPVEKEEVKVSGTVSTNFPQTIEPAKLWSRQEVNPVRQEIESETTSEEQIQEEKSFESPQNSPATEQTIFDSQTFTETELKTTDYSVLTTKKTYSDDKEMKEEDTSLVNMSTPDPDANGLESYTTLPEATEKSHFFLATALVTESIPAEHVVTDSPIKKEESTKHFPKGMRPTIQESDTELLFSGLGSGEEVLPTLPTESVNFTEVEQINNTLYPHTSQVESTSSDKIEDFNRMENVAKEVGPLVSQTDIFEGSGSVTSTTLIEILSDTGAEGPTVAPLPFSTDIGHPQNQTVRWAEEIQTSRPQTITEQDSNKNSSTAEINETTTSSTDFLARAYGFEMAKEFVTSAPKPSDLYYEPSGEGSGEVDIVDSFHTSATTQATRQESSTTFVSDGSLEKHPEVPSAKAVTADGFPTVSVMLPLHSEQNKSSPDPTSTLSNTVSYERSTDGSFQDRFREFEDSTLKPNRKKPTENIIIDLDKEDKDLILTITESTILEILPELTSDKNTIIDIDHTKPVYEDILGMQTDIDTEVPSEPHDSNDESNDDSTQVQEIYEAAVNLSLTEETFEGSADVLASYTQATHDESMTYEDRSQLDHMGFHFTTGIPAPSTETELDVLLPTATSLPIPRKSATVIPEIEGIKAEAKALDDMFESSTLSDGQAIADQSEIIPTLGQFERTQEEYEDKKHAGPSFQPEFSSGAEEALVDHTPYLSIATTHLMDQSVTEVPDVMEGSNPPYYTDTTLAVSTFAKLSSQTPSSPLTIYSGSEASGHTEIPQPSALPGIDVGSSVMSPQDSFKEIHVNIEATFKPSSEEYLHITEPPSLSPDTKLEPSEDDGKPELLEEMEASPTELIAVEGTEILQDFQNKTDGQVSGEAIKMFPTIKTPEAGTVITTADEIELEGATQWPHSTSASATYGVEAGVVPWLSPQTSERPTLSSSPEINPETQAALIRGQDSTIAASEQQVAARILDSNDQATVNPVEFNTEVATPPFSLLETSNETDFLIGINEESVEGTAIYLPGPDRCKMNPCLNGGTCYPTETSYVCTCVPGYSGDQCELDFDECHSNPCRNGATCVDGFNTFRCLCLPSYVGALCEQDTETCDYGWHKFQGQCYKYFAHRRTWDAAERECRLQGAHLTSILSHEEQMFVNRVGHDYQWIGLNDKMFEHDFRWTDGSTLQYENWRPNQPDSFFSAGEDCVVIIWHENGQWNDVPCNYHLTYTCKKGTVACGQPPVVENAKTFGKMKPRYEINSLIRYHCKDGFIQRHLPTIRCLGNGRWAIPKITCMNPSAYQRTYSMKYFKNSSSAKDNSINTSKHDHRWSRRWQESRR

SEQ ID NO: 14028 - protein, 1642 aa, Homo Sapiens
MFINIKSILWMCSTLIVTHALHKVKVGKSPPVRGSLSGKVSLPCHFSTMPTLPPSYNTSEFLRIKWSKIEVDKNGKDLKETTVLVAQNGNIKIGQDYKGRVSVPTHPEAVGDASLTVVKLLASDAGLYRCDVMYGIEDTQDTVSLTVDGVVFHYRAATSRYTLNFEAAQKACLDVGAVIATPEQLFAAYEDGFEQCDAGWLADQTVRYPIRAPRVGCYGDKMGKAGVRTYGFRSPQETYDVYCYVDHLDGDVFHLTVPSKFTFEEAAKECENQDARLATVGELQAAWRNGFDQCDYGWLSDASVRHPVTVARAQCGGGLLGVRTLYRFENQTGFPPPDSRFDAYCFKPKEATTIDLSILAETASPSLSKEPQMVSDRTTPIIPLVDELPVIPTEFPPVGNIVSFEQKATVQPQAITDSLATKLPTPTGSTKKPWDMDDYSPSASGPLGKLDISEIKEEVLQSTTGVSHYATDSWDGVVEDKQTQESVTQIEQIEVGPLVTSMEILKHIPSKEFPVTETPLVTARMILESKTEKKMVSTVSELVTTGHYGFTLGEEDDEDRTLTVGSDESTLIFDQIPEVITVSKTSEDTIHTHLEDLESVSASTTVSPLIMPDNNGSSMDDWEERQTSGRITEEFLGKYLSTTPFPSQHRTEIELFPYSGDKILVEGISTVIYPSLQTEMTHRRERTETLIPEMRTDTYTDEIQEEITKSPFMGKTEEEVFSGMKLSTSLSEPIHVTESSVEMTKSFDFPTLITKLSAEPTEVRDMEEDFTATPGTTKYDENITTVLLAHGTLSVEAATVSKWSWDEDNTTSKPLESTEPSASSKLPPALLTTVGMNGKDKDIPSFTEDGADEFTLIPDSTQKQLEEVTDEDIAAHGKFTIRFQPTTSTGIAEKSTLRDSTTEEKVPPITSTEGQVYATMEGSALGEVEDVDLSKPVSTVPQFAHTSEVEGLAFVSYSSTQEPTTYVDSSHTIPLSVIPKTDWGVLVPSVPSEDEVLGEPSQDILVIDQTRLEATISPETMRTTKITEGTTQEEFPWKEQTAEKPVPALSSTAWTPKEAVTPLDEQEGDGSAYTVSEDELLTGSERVPVLETTPVGKIDHSVSYPPGAVTEHKVKTDEVVTLTPRIGPKVSLSPGPEQKYETEGSSTTGFTSSLSPFSTHITQLMEETTTEKTSLEDIDLGSGLFEKPKATELIEFSTIKVTVPSDITTAFSSVDRLHTTSAFKPSSAITKKPPLIDREPGEETTSDMVIIGESTSHVPPTTLEDIVAKETETDIDREYFTTSSPPATQPTRPPTVEDKEAFGPQALSTPQPPASTKFHPDINVYIIEVRENKTGPDRCKMNPCLNGGTCYPTETSYVCTCVPGYSGDQCELDFDECHSNPCRNGATCVDGFNTFRCLCLPSYVGALCEQDTETCDYGWHKFQGQCYKYFAHRRTWDAAERECRLQGAHLTSILSHEEQMFVNRVGHDYQWIGLNDKMFEHDFRWTDGSTLQYENWRPNQPDSFFSAGEDCVVIIWHENGQWNDVPCNYHLTYTCKKGTVACGQPPVVENAKTFGKMKPRYEINSLIRYHCKDGFIQRHLPTIRCLGNGRWAIPKITCMNPSAYQRTYSMKYFKNSSSAKDNSINTSKHDHRWSRRWQESRR

SEQ ID NO: 14029 - protein, 1240 aa, Homo Sapiens
MFINIKSILWMCSTLIVTHALHKVKVGKSPPVRGSLSGKVSLPCHFSTMPTLPPSYNTSEFLRIKWSKIEVDKNGKDLKETTVLVAQNGNIKIGQDYKGRVSVPTHPEAVGDASLTVVKLLASDAGLYRCDVMYGIEDTQDTVSLTVDGVVFHYRAATSRYTLNFEAAQKACLDVGAVIATPEQLFAAYEDGFEQCDAGWLADQTVRYPIRAPRVGCYGDKMGKAGVRTYGFRSPQETYDVYCYVDHLDGDVFHLTVPSKFTFEEAAKECENQDARLATVGELQAAWRNGFDQCDYGWLSDASVRHPVTVARAQCGGGLLGVRTLYRFENQTGFPPPDSRFDAYCFKRRMSDLSVIGHPIDSESKEDEPCSEETDPVHDLMAEILPEFPDIIEIDLYHSEENEEEEEECANATDVTTTPSVQYINGKHLVTTVPKDPEAAEARRGQFESVAPSQNFSDSSESDTHPFVIAKTELSTAVQPNESTETTESLEVTWKPETYPETSEHFSGGEPDVFPTVPFHEEFESGTAKKGAESVTERDTEVGHQAHEHTEPVSLFPEESSGEIAIDQESQKIAFARATEVTFGEEVEKSTSVTYTPTIVPSSASAYVSEEEAVTLIGNPWPDDLLSTKESWVEATPRQVVELSGSSSIPITEGSGEAEEDEDTMFTMVTDLSQRNTTDTLITLDTSRIITESFFEVPATTIYPVSEQPSAKVVPTKFVSETDTSEWISSTTVEEKKRKEEEGTTGTASTFEVYSSTQRSDQLILPFELESPNVATSSDSGTRKSFMSLTTPTQSEREMTDSTPVFTETNTLENLGAQTTEHSSIHQPGVQEGLTTLPRSPASVFMEQGSGEAAADPETTTVSSFSLNVEYAIQAEKEVAGTLSPHVETTFSTEPTGLVLSTVMDRVVAENITQTSREIVISERLGEPNYGAEIRGFSTGFPLEEDFSGDFREYSTVSHPIAKEETVMMEGSGDAAFRDTQTSPSTVPTSVHISHISDSEGPSSTMVSTSAFPWEEFTSSAEGSGEQLVTVSSSVVPVLPSAVQKFSGTASSIIDEGLGEVGTVNEIDRRSTILPTAEVEGTKAPVEKEEVKVSGTVSTNFPQTIEPAKLWSRQEVNPVRQEIESETTSEEQIQEEKSFESPQNSPATEQTIFDSQTFTETELKTTDYSVLTTKKTYSDDKEMKEEDTSLVNMSTPDPDANGLESYTTLPEATEKSHFFLATALVTESIPAEHVVTDSPI

SEQ ID NO: 14030 - protein, 655 aa, Homo Sapiens
MFINIKSILWMCSTLIVTHALHKVKVGKSPPVRGSLSGKVSLPCHFSTMPTLPPSYNTSEFLRIKWSKIEVDKNGKDLKETTVLVAQNGNIKIGQDYKGRVSVPTHPEAVGDASLTVVKLLASDAGLYRCDVMYGIEDTQDTVSLTVDGVVFHYRAATSRYTLNFEAAQKACLDVGAVIATPEQLFAAYEDGFEQCDAGWLADQTVRYPIRAPRVGCYGDKMGKAGVRTYGFRSPQETYDVYCYVDHLDGDVFHLTVPSKFTFEEAAKECENQDARLATVGELQAAWRNGFDQCDYGWLSDASVRHPVTVARAQCGGGLLGVRTLYRFENQTGFPPPDSRFDAYCFKRPDRCKMNPCLNGGTCYPTETSYVCTCVPGYSGDQCELDFDECHSNPCRNGATCVDGFNTFRCLCLPSYVGALCEQDTETCDYGWHKFQGQCYKYFAHRRTWDAAERECRLQGAHLTSILSHEEQMFVNRVGHDYQWIGLNDKMFEHDFRWTDGSTLQYENWRPNQPDSFFSAGEDCVVIIWHENGQWNDVPCNYHLTYTCKKGTVACGQPPVVENAKTFGKMKPRYEINSLIRYHCKDGFIQRHLPTIRCLGNGRWAIPKITCMNPSAYQRTYSMKYFKNSSSAKDNSINTSKHDHRWSRRWQESRR

SEQ ID NO: 14031 - protein, 354 aa, Homo Sapiens
MFINIKSILWMCSTLIVTHALHKVKVGKSPPVRGSLSGKVSLPCHFSTMPTLPPSYNTSEFLRIKWSKIEVDKNGKDLKETTVLVAQNGNIKIGQDYKGRVSVPTHPEAVGDASLTVVKLLASDAGLYRCDVMYGIEDTQDTVSLTVDGVVFHYRAATSRYTLNFEAAQKACLDVGAVIATPEQLFAAYEDGFEQCDAGWLADQTVRYPIRAPRVGCYGDKMGKAGVRTYGFRSPQETYDVYCYVDHLDGDVFHLTVPSKFTFEEAAKECENQDARLATVGELQAAWRNGFDQCDYGWLSDASVRHPVTVARAQCGGGLLGVRTLYRFENQTGFPPPDSRFDAYCFKRKCLIPF

SEQ ID NO: 14032 - protein, 1594 aa, Homo Sapiens
MPTLPPSYNTSEFLRIKWSKIEVDKNGKDLKETTVLVAQNGNIKIGQDYKGRVSVPTHPEAVGDASLTVVKLLASDAGLYRCDVMYGIEDTQDTVSLTVDGVVFHYRAATSRYTLNFEAAQKACLDVGAVIATPEQLFAAYEDGFEQCDAGWLADQTVRYPIRAPRVGCYGDKMGKAGVRTYGFRSPQETYDVYCYVDHLDGDVFHLTVPSKFTFEEAAKECENQDARLATVGELQAAWRNGFDQCDYGWLSDASVRHPVTVARAQCGGGLLGVRTLYRFENQTGFPPPDSRFDAYCFKPKEATTIDLSILAETASPSLSKEPQMVSDRTTPIIPLVDELPVIPTEFPPVGNIVSFEQKATVQPQAITDSLATKLPTPTGSTKKPWDMDDYSPSASGPLGKLDISEIKEEVLQSTTGVSHYATDSWDGVVEDKQTQESVTQIEQIEVGPLVTSMEILKHIPSKEFPVTETPLVTARMILESKTEKKMVSTVSELVTTGHYGFTLGEEDDEDRTLTVGSDESTLIFDQIPEVITVSKTSEDTIHTHLEDLESVSASTTVSPLIMPDNNGSSMDDWEERQTSGRITEEFLGKYLSTTPFPSQHRTEIELFPYSGDKILVEGISTVIYPSLQTEMTHRRERTETLIPEMRTDTYTDEIQEEITKSPFMGKTEEEVFSGMKLSTSLSEPIHVTESSVEMTKSFDFPTLITKLSAEPTEVRDMEEDFTATPGTTKYDENITTVLLAHGTLSVEAATVSKWSWDEDNTTSKPLESTEPSASSKLPPALLTTVGMNGKDKDIPSFTEDGADEFTLIPDSTQKQLEEVTDEDIAAHGKFTIRFQPTTSTGIAEKSTLRDSTTEEKVPPITSTEGQVYATMEGSALGEVEDVDLSKPVSTVPQFAHTSEVEGLAFVSYSSTQEPTTYVDSSHTIPLSVIPKTDWGVLVPSVPSEDEVLGEPSQDILVIDQTRLEATISPETMRTTKITEGTTQEEFPWKEQTAEKPVPALSSTAWTPKEAVTPLDEQEGDGSAYTVSEDELLTGSERVPVLETTPVGKIDHSVSYPPGAVTEHKVKTDEVVTLTPRIGPKVSLSPGPEQKYETEGSSTTGFTSSLSPFSTHITQLMEETTTEKTSLEDIDLGSGLFEKPKATELIEFSTIKVTVPSDITTAFSSVDRLHTTSAFKPSSAITKKPPLIDREPGEETTSDMVIIGESTSHVPPTTLEDIVAKETETDIDREYFTTSSPPATQPTRPPTVEDKEAFGPQALSTPQPPASTKFHPDINVYIIEVRENKTGPDRCKMNPCLNGGTCYPTETSYVCTCVPGYSGDQCELDFDECHSNPCRNGATCVDGFNTFRCLCLPSYVGALCEQDTETCDYGWHKFQGQCYKYFAHRRTWDAAERECRLQGAHLTSILSHEEQMFVNRVGHDYQWIGLNDKMFEHDFRWTDGSTLQYENWRPNQPDSFFSAGEDCVVIIWHENGQWNDVPCNYHLTYTCKKGTVACGQPPVVENAKTFGKMKPRYEINSLIRYHCKDGFIQRHLPTIRCLGNGRWAIPKITCMNPSAYQRTYSMKYFKNSSSAKDNSINTSKHDHRWSRRWQESRR

SEQ ID NO: 14033 - protein, 111 aa, Homo Sapiens
APMAEGGGQNHHEVVKFMDVYQRSYCHPIETLVDIFQEYPDEIEYIFKPSCVPLMRCGGCCNDEGLECVPTEESNITMQTCKCSCKNTDSRCKARQLELNERTCRCDKPRR

SEQ ID NO: 14034 - protein, 317 aa, Homo Sapiens
LTDRQTDTAPSPSYHLLPGRRRTVDAAASRGQGPEPAPGGGVEGVGARGVALKLFVQLLGCSRFGGAVVRAGEAEPSGAARSASSGREEPQPEEGEEEEEKEEERGPQWRLGARKPGSWTGEAAVCADSAPAARAPQALARASGRGGRVARRGAEESGPPHSPSRRGSASRAGPGRASETMNFLLSWVHWSLALLLYLHHAKWSQAAPMAEGGGQNHHEVVKFMDVYQRSYCHPIETLVDIFQEYPDEIEYIFKPSCVPLMRCGGCCNDEGLECVPTEESNITMQIMRIKPHQGQHIGEMSFLQHNKCECRCDKPRR

SEQ ID NO: 14035 - protein, 327 aa, Homo Sapiens
LTDRQTDTAPSPSYHLLPGRRRTVDAAASRGQGPEPAPGGGVEGVGARGVALKLFVQLLGCSRFGGAVVRAGEAEPSGAARSASSGREEPQPEEGEEEEEKEEERGPQWRLGARKPGSWTGEAAVCADSAPAARAPQALARASGRGGRVARRGAEESGPPHSPSRRGSASRAGPGRASETMNFLLSWVHWSLALLLYLHHAKWSQAAPMAEGGGQNHHEVVKFMDVYQRSYCHPIETLVDIFQEYPDEIEYIFKPSCVPLMRCGGCCNDEGLECVPTEESNITMQIMRIKPHQGQHIGEMSFLQHNKCECRPKKDRARQEKCDKPRR

SEQ ID NO: 14036 - protein, 412 aa, Homo Sapiens
LTDRQTDTAPSPSYHLLPGRRRTVDAAASRGQGPEPAPGGGVEGVGARGVALKLFVQLLGCSRFGGAVVRAGEAEPSGAARSASSGREEPQPEEGEEEEEKEEERGPQWRLGARKPGSWTGEAAVCADSAPAARAPQALARASGRGGRVARRGAEESGPPHSPSRRGSASRAGPGRASETMNFLLSWVHWSLALLLYLHHAKWSQAAPMAEGGGQNHHEVVKFMDVYQRSYCHPIETLVDIFQEYPDEIEYIFKPSCVPLMRCGGCCNDEGLECVPTEESNITMQIMRIKPHQGQHIGEMSFLQHNKCECRPKKDRARQEKKSVRGKGKGQKRKRKKSRYKSWSVYVGARCCLMPWSLPGPHPCGPCSERRKHLFVQDPQTCKCSCKNTDSRCKARQLELNERTCRCDKPRR

SEQ ID NO: 14037 - protein, 389 aa, Homo Sapiens
LTDRQTDTAPSPSYHLLPGRRRTVDAAASRGQGPEPAPGGGVEGVGARGVALKLFVQLLGCSRFGGAVVRAGEAEPSGAARSASSGREEPQPEEGEEEEEKEEERGPQWRLGARKPGSWTGEAAVCADSAPAARAPQALARASGRGGRVARRGAEESGPPHSPSRRGSASRAGPGRASETMNFLLSWVHWSLALLLYLHHAKWSQAAPMAEGGGQNHHEVVKFMDVYQRSYCHPIETLVDIFQEYPDEIEYIFKPSCVPLMRCGGCCNDEGLECVPTEESNITMQIMRIKPHQGQHIGEMSFLQHNKCECRPKKDRARQEKKSVRGKGKGQKRKRKKSRPCGPCSERRKHLFVQDPQTCKCSCKNTDSRCKARQLELNERTCRCDKPRR

SEQ ID NO: 14038 - protein, 354 aa, Homo Sapiens
LTDRQTDTAPSPSYHLLPGRRRTVDAAASRGQGPEPAPGGGVEGVGARGVALKLFVQLLGCSRFGGAVVRAGEAEPSGAARSASSGREEPQPEEGEEEEEKEEERGPQWRLGARKPGSWTGEAAVCADSAPAARAPQALARASGRGGRVARRGAEESGPPHSPSRRGSASRAGPGRASETMNFLLSWVHWSLALLLYLHHAKWSQAAPMAEGGGQNHHEVVKFMDVYQRSYCHPIETLVDIFQEYPDEIEYIFKPSCVPLMRCGGCCNDEGLECVPTEESNITMQIMRIKPHQGQHIGEMSFLQHNKCECRPKKDRARQENPCGPCSERRKHLFVQDPQTCKCSCKNTDSRCKM

SEQ ID NO: 14039 - protein, 371 aa, Homo Sapiens
LTDRQTDTAPSPSYHLLPGRRRTVDAAASRGQGPEPAPGGGVEGVGARGVALKLFVQLLGCSRFGGAVVRAGEAEPSGAARSASSGREEPQPEEGEEEEEKEEERGPQWRLGARKPGSWTGEAAVCADSAPAARAPQALARASGRGGRVARRGAEESGPPHSPSRRGSASRAGPGRASETMNFLLSWVHWSLALLLYLHHAKWSQAAPMAEGGGQNHHEVVKFMDVYQRSYCHPIETLVDIFQEYPDEIEYIFKPSCVPLMRCGGCCNDEGLECVPTEESNITMQIMRIKPHQGQHIGEMSFLQHNKCECRPKKDRARQENPCGPCSERRKHLFVQDPQTCKCSCKNTDSRCKARQLELNERTCRCDKPRR

SEQ ID NO: 14040 - protein, 395 aa, Homo Sapiens
LTDRQTDTAPSPSYHLLPGRRRTVDAAASRGQGPEPAPGGGVEGVGARGVALKLFVQLLGCSRFGGAVVRAGEAEPSGAARSASSGREEPQPEEGEEEEEKEEERGPQWRLGARKPGSWTGEAAVCADSAPAARAPQALARASGRGGRVARRGAEESGPPHSPSRRGSASRAGPGRASETMNFLLSWVHWSLALLLYLHHAKWSQAAPMAEGGGQNHHEVVKFMDVYQRSYCHPIETLVDIFQEYPDEIEYIFKPSCVPLMRCGGCCNDEGLECVPTEESNITMQIMRIKPHQGQHIGEMSFLQHNKCECRPKKDRARQEKKSVRGKGKGQKRKRKKSRYKSWSVPCGPCSERRKHLFVQDPQTCKCSCKNTDSRCKARQLELNERTCRCDKPRR

SEQ ID NO: 14041 - protein, 371 aa, Homo Sapiens
LTDRQTDTAPSPSYHLLPGRRRTVDAAASRGQGPEPAPGGGVEGVGARGVALKLFVQLLGCSRFGGAVVRAGEAEPSGAARSASSGREEPQPEEGEEEEEKEEERGPQWRLGARKPGSWTGEAAVCADSAPAARAPQALARASGRGGRVARRGAEESGPPHSPSRRGSASRAGPGRASETMNFLLSWVHWSLALLLYLHHAKWSQAAPMAEGGGQNHHEVVKFMDVYQRSYCHPIETLVDIFQEYPDEIEYIFKPSCVPLMRCGGCCNDEGLECVPTEESNITMQIMRIKPHQGQHIGEMSFLQHNKCECRPKKDRARQENPCGPCSERRKHLFVQDPQTCKCSCKNTDSRCKARQLELNERTCRSLTRKD

SEQ ID NO: 14042 - protein, 371 aa, Homo Sapiens; identical to SEQ ID NO: 14039

SEQ ID NO: 14043 - protein, 327 aa, Homo Sapiens; identical to SEQ ID NO: 14035

SEQ ID NO: 14044 - protein, 389 aa, Homo Sapiens; identical to SEQ ID NO: 14037

SEQ ID NO: 14045 - protein, 371 aa, Homo Sapiens; identical to SEQ ID NO: 14041

SEQ ID NO: 14046 - protein, 354 aa, Homo Sapiens; identical to SEQ ID NO: 14038

SEQ ID NO: 14047 - protein, 395 aa, Homo Sapiens; identical to SEQ ID NO: 14040

SEQ ID NO: 14048 - protein, 412 aa, Homo Sapiens; identical to SEQ ID NO: 14036

SEQ ID NO: 14049 - protein, 163 aa, Homo Sapiens
MAEGGGQNHHEVVKFMDVYQRSYCHPIETLVDIFQEYPDEIEYIFKPSCVPLMRCGGCCNDEGLECVPTEESNITMQIMRIKPHQGQHIGEMSFLQHNKCECRPKKDRARQENPCGPCSERRKHLFVQDPQTCKCSCKNTDSRCKARQLELNERTCRCDKPRR

SEQ ID NO: 14050 - protein, 137 aa, Homo Sapiens
MNFLLSWVHWSLALLLYLHHAKWSQAAPMAEGGGQNHHEVVKFMDVYQRSYCHPIETLVDIFQEYPDEIEYIFKPSCVPLMRCGGCCNDEGLECVPTEESNITMQIMRIKPHQGQHIGEMSFLQHNKCECRCDKPRR

SEQ ID NO: 14051 - protein, 147 aa, Homo Sapiens
MNFLLSWVHWSLALLLYLHHAKWSQAAPMAEGGGQNHHEVVKFMDVYQRSYCHPIETLVDIFQEYPDEIEYIFKPSCVPLMRCGGCCNDEGLECVPTEESNITMQIMRIKPHQGQHIGEMSFLQHNKCECRPKKDRARQEKCDKPRR

SEQ ID NO: 14052 - protein, 209 aa, Homo Sapiens
MNFLLSWVHWSLALLLYLHHAKWSQAAPMAEGGGQNHHEVVKFMDVYQRSYCHPIETLVDIFQEYPDEIEYIFKPSCVPLMRCGGCCNDEGLECVPTEESNITMQIMRIKPHQGQHIGEMSFLQHNKCECRPKKDRARQEKKSVRGKGKGQKRKRKKSRPCGPCSERRKHLFVQDPQTCKCSCKNTDSRCKARQLELNERTCRCDKPRR

SEQ ID NO: 14053 - protein, 215 aa, Homo Sapiens
MNFLLSWVHWSLALLLYLHHAKWSQAAPMAEGGGQNHHEVVKFMDVYQRSYCHPIETLVDIFQEYPDEIEYIFKPSCVPLMRCGGCCNDEGLECVPTEESNITMQIMRIKPHQGQHIGEMSFLQHNKCECRPKKDRARQEKKSVRGKGKGQKRKRKKSRYKSWSVPCGPCSERRKHLFVQDPQTCKCSCKNTDSRCKARQLELNERTCRCDKPRR

SEQ ID NO: 14054 - protein, 232 aa, Homo Sapiens
MNFLLSWVHWSLALLLYLHHAKWSQAAPMAEGGGQNHHEVVKFMDVYQRSYCHPIETLVDIFQEYPDEIEYIFKPSCVPLMRCGGCCNDEGLECVPTEESNITMQIMRIKPHQGQHIGEMSFLQHNKCECRPKKDRARQEKKSVRGKGKGQKRKRKKSRYKSWSVYVGARCCLMPWSLPGPHPCGPCSERRKHLFVQDPQTCKCSCKNTDSRCKARQLELNERTCRCDKPRR

SEQ ID NO: 14055 - protein, 191 aa, Homo Sapiens
MNFLLSWVHWSLALLLYLHHAKWSQAAPMAEGGGQNHHEVVKFMDVYQRSYCHPIETLVDIFQEYPDEIEYIFKPSCVPLMRCGGCCNDEGLECVPTEESNITMQIMRIKPHQGQHIGEMSFLQHNKCECRPKKDRARQENPCGPCSERRKHLFVQDPQTCKCSCKNTDSRCKARQLELNERTCRCDKPRR

SEQ ID NO: 14056 - protein, 191 aa, Homo Sapiens
MNFLLSWVHWSLALLLYLHHAKWSQAAPMAEGGGQNHHEVVKFMDVYQRSYCHPIETLVDIFQEYPDEIEYIFKPSCVPLMRCGGCCNDEGLECVPTEESNITMQIMRIKPHQGQHIGEMSFLQHNKCECRPKKDRARQENPCGPCSERRKHLFVQDPQTCKCSCKNTDSRCKARQLELNERTCRSLTRKD

SEQ ID NO: 14057 - protein, 174 aa, Homo Sapiens
MNFLLSWVHWSLALLLYLHHAKWSQAAPMAEGGGQNHHEVVKFMDVYQRSYCHPIETLVDIFQEYPDEIEYIFKPSCVPLMRCGGCCNDEGLECVPTEESNITMQIMRIKPHQGQHIGEMSFLQHNKCECRPKKDRARQENPCGPCSERRKHLFVQDPQTCKCSCKNTDSRCKM

SEQ ID NO: 14058 - protein, 323 aa, Homo Sapiens
  misc_feature (1)..(1): Xaa can be any naturally occurring amino acid
XRGQGPEPAPGGGVEGVGARGVALKLFVQLLGCSRFGGAVVRAGEAEPSGAARSASSGREEPQPEEGEEEEEKEEERGPQWRLGARKPGSWTGEAAVCADSAPAARAPQALARASGRGGRVARRGAEESGPPHSPSRRGSASRAGPGRASETMNFLLSWVHWSLALLLYLHHAKWSQAAPMAEGGGQNHHEVVKFMDVYQRSYCHPIETLVDIFQEYPDEIEYIFKPSCVPLMRCGGCCNDEGLECVPTEESNITMQIMRIKPHQGQHIGEMSFLQHNKCECRPKKDRARQEKKSVRGKGKGQKRKRKKSRYKSWSVCDKPRR

SEQ ID NO: 14059 - protein, 207 aa, Homo Sapiens
MSPLLRRLLLAALLQLAPAQAPVSQPDAPGHQRKVVSWIDVYTRATCQPREVVVPLTVELMGTVAKQLVPSCVTVQRCGGCCPDDGLECVPTGQHQVRMQILMIRYPSSQLGEMSLEEHSQCECRPKKKDSAVKPDRAATPHHRPQPRSVPGWDSAPGAPSPADITHPTPAPGPSAHAAPSTTSALTPGPAAAAADAAASSVAKGGA

SEQ ID NO: 14060 - protein, 188 aa, Homo Sapiens
MSPLLRRLLLAALLQLAPAQAPVSQPDAPGHQRKVVSWIDVYTRATCQPREVVVPLTVELMGTVAKQLVPSCVTVQRCGGCCPDDGLECVPTGQHQVRMQILMIRYPSSQLGEMSLEEHSQCECRPKKKDSAVKPDSPRPLCPRCTQHHQRPDPRTCRCRCRRRSFLRCQGRGLELNPDTCRCRKLRR

SEQ ID NO: 14061 - protein, 32 aa, Homo Sapiens
  misc_feature (1)..(1): Xaa can be any naturally occurring amino acid
XHAAPSTTSALTPGPAAAAADAAASSVAKGGA

SEQ ID NO: 14062 - protein, 419 aa, Homo Sapiens
MHLLGFFSVACSLLAAALLPGPREAPAAAAAFESGLDLSDAEPDAGEATAYASKDLEEQLRSVSSVDELMTVLYPEYWKMYKCQLRKGGWQHNREQANLNSRTEETIKFAAAHYNTEILKSIDNEWRKTQCMPREVCIDVGKEFGVATNTFFKPPCVSVYRCGGCCNSEGLQCMNTSTSYLSKTLFEITVPLSQGPKPVTISFANHTSCRCMSKLDVYRQVHSIIRRSLPATLPQCQAANKTCPTNYMWNNHICRCLAQEDFMFSSDAGDDSTDGFHDICGPNKELDEETCQCVCRAGLRPASCGPHKELDRNSCQCVCKNKLFPSQCGANREFDENTCQCVCKRTCPRNQPLNPGKCACECTESPQKCLLKGKKFHHQTCSCYRRPCTNRQKACEPGFSYSEEVCRCVPSYWKRPQMS

SEQ ID NO: 14063 - protein, 354 aa, Homo Sapiens
MYREWVVVNVFMMLYVQLVQGSSNEHGPVKRSSQSTLERSEQQIRAASSLEELLRITHSEDWKLWRCRLRLKSFTSMDSRSASHRSTRFAATFYDIETLKVIDEEWQRTQCSPRETCVEVASELGKSTNTFFKPPCVNVFRCGGCCNEESLICMNTSTSYISKQLFEISVPLTSVPELVPVKVANHTGCKCLPTAPRHPYSIIRRSIQIPEEDRCSHSKKLCPIDMLWDSNKCKCVLQEENPLAGTEDHSHLQEPALCGPHMMFDEDRCECVCKTPCPKDLIQHPKNCSCFECKESLETCCQKHKLFHPDTCSCEDRCPFHTRPCASGKTACAKHCRFPKEKRAAQGPHSRKNP

SEQ ID NO: 14064 - protein, 615 aa, Homo Sapiens
MKALRLSASALFCLLLINGLGAAPPGRPEAQPPPLSSEHKEPVAGDAVPGPKDGSAPEVRGARNSEPQDEGELFQGVDPRALAAVLLQALDRPASPPAPSGSQQGPEEEAAEALLTETVRSQTHSLPAPESPEPAAPPRPQTPENGPEASDPSEELEALASLLQELRDFSPSSAKRQQETAAAETETRTHTLTRVNLESPGPERVWRASWGEFQARVPERAPLPPPAPSQFQARMPDSGPLPETHKFGEGVSSPKTHLGEALAPLSKAYQGVAAPFPKARRPESALLGGSEAGERLLQQGLAQVEAGRRQAEATRQAAAQEERLADLASDLLLQYLLQGGARQRGLGGRGLQEAAEERESAREEEEAEQERRGGEERVGEEDEEAAEAEAEAEEAERARQNALLFAEEEDGEAGAEDKRSQEETPGHRRKEAEGTEEGGEEEDDEEMDPQTIDSLIELSTKLHLPADDVVSIIEEVEEKRKRKKNAPPEPVPPPRAAPAPTHVRSPQPPPPAPAPARDELPDWNEVLPPWDREEDEVYPPGPYHPFPNYIRPRTLQPPSALRRRHYHHALPPSRHYPGREAQARRAQEEAEAEERRLQEQEELENYIEHVLLRRP

SEQ ID NO: 14065 - protein, 615 aa, Homo Sapiens; identical to SEQ ID NO: 14064

SEQ ID NO: 14066 - protein, 377 aa, Homo Sapiens
MKALRLSASALFCLLLINGLGAAPPGRPEAQPPPLSSEHKEPVAGDAVPGPKDGSAPEVRGARNSEPQDEGELFQGVDPRALAAVLLQALDRPASPPAPSGSQQGPEEEAAEALLTETVRSQTHSLPAPESPEPAAPPRPQTPENGPEASDPSEELEALASLLQELRDFSPSSAKRQQETAAAETETRTHTLTRVNLESPGPERVWRASWGEFQARVPERAPLPPPAPSQFQARMPDSGPLPETHKFGEGVSSPKTHLGEALAPLSKAYQGVAAPFPKARRPESALLGGSEAGERLLQQGLAQVEAGRRQAEATRQAAAQEERLADLASDLLLQFAAGRGPAARPCPLALPLSPGCVGTCQTPLPGPEPELPELTRG

SEQ ID NO: 14067 - protein, 169 aa, Homo Sapiens
MDTRNKAQLLVLLTLLSVLFSQTSAWPLYRAPSALRLGDRIPFEGANEPDQVSLKEDIDMLQNALAENDTPYYDVSRNARHADGVFTSDFSKLLGQLSAKKYLESLMGKRVSNISEDPVPVKRHSDAVFTDNYTRLRKQMAVKKYLNSILNGKRSSEGESPDFPEELEK

SEQ ID NO: 14068 - protein, 170 aa, Homo Sapiens
MDTRNKAQLLVLLTLLSVLFSQTSAWPLYRAPSALRLGDRIPFEGANEPDQVSLKEDIDMLQNALAENDTPYYDVSRNARHADGVFTSDFSKLLGQLSAKKYLESLMGKRVSSNISEDPVPVKRHSDAVFTDNYTRLRKQMAVKKYLNSILNGKRSSEGESPDFPEELEK

SEQ ID NO: 14069 - protein, 119 aa, Homo Sapiens
  misc_feature (1)..(1): Xaa can be any naturally occurring amino acid
XVSLKEDIDMLQNALAENDTPYYDVSRNARHADGVFTSDFSKLLGQLSAKKYLESLMGKRVSSNISEDPVPVKRHSDAVFTDNYTRLRKQMAVKKYLNSILNGKRSEGESPDFPEELEK

SEQ ID NO: 14070 - protein, 422 aa, Homo Sapiens
MPLWEAPSDHPANPPATLQGHTSLPGCQEEPARDPQSGLPQITSESSSFSEGSLPSWSSGPAGAKLNASHEGIGSSSDGNGDSKAATERVVSAMDTVRRKHPEITFYILVKAIYTLGYSVSLMSLATGSIILCLFRKLHCTRNYIHLNLFLSFILRAISVLVKDDVLYSSSGTLHCPDQPSSWVGCKLSLVFLQYCIMANFFWLLVEGLYLHTLLVAMLPPRRCFLAYLLIGWGLPTVCIGAWTAARLYLEDTGCWDTNDHSVPWWVIRIPILISIIVNFVLFISIIRILLQKLTSPDVGGNDQSQYKRLAKSTLLLIPLFGVHYMVFAVFPISISSKYQILFELCLGSFQGLVVAVLYCFLNSEVQCELKRKWRSRCPTPSASRDYRVCGSSFSRNGSEGALQFHRGSRAQSFLQTETSVI

SEQ ID NO: 14071 - protein, 438 aa, Homo Sapiens
MRTLLPPALLTCWLLAPVNSIHPECRFHLEIQEEETKCAELLRSQTEKHKACSGVWDNITCWRPANVGETVTVPCPKVFSNFYSKAGNISKNCTSDGWSETFPDFVDACGYSDPEDESKITFYILVKAIYTLGYSVSLMSLATGSIILCLFRKLHCTRNYIHLNLFLSFILRAISVLVKDDVLYSSSGTLHCPDQPSSWVGCKLSLVFLQYCIMANFFWLLVEGLYLHTLLVAMLPPRRCFLAYLLIGWGLPTVCIGAWTAARLYLEDTGCWDTNDHSVPWWVIRIPILISIIVNFVLFISIIRILLQKLTSPDVGGNDQSQYKRLAKSTLLLIPLFGVHYMVFAVFPISISSKYQILFELCLGSFQGLVVAVLYCFLNSEVQCELKRKWRSRCPTPSASRDYRVCGSSFSRNGSEGALQFHRGSRAQSFLQTETSVI

SEQ ID NO: 14072 - protein, 77 aa, Homo Sapiens
MRTLLPPALLTCWLLAPVNSIHPECRFHLEIQEEETKCAELLRSQTEKHKGHTKGFILIHAGGLKRILDPHTYPLAP

SEQ ID NO: 14073 - protein, 579 aa, Homo Sapiens
MRTLLPPALLTCWLLAPVSAPATPAPRRLGPGSPLPRRALLPPVFAFLPGAGARAGSGRGSGVARGPELPPGEREALSSGPAGLRDSGWEAACALPRAPPSGVCWKRDRFFLDASTMSSFGAVPGAGSCGRLRGLRVSRGDRGWRWPQMPLGPSLYLLVNSIHPECRFHLEIQEEETKCAELLRSQTEKHKACSGVWDNITCWRPANVGETVTVPCPKVFSNFYSKAGNISKNCTSDGWSETFPDFVDACGYSDPEDESKITFYILVKAIYTLGYSVSLMSLATGSIILCLFRKLHCTRNYIHLNLFLSFILRAISVLVKDDVLYSSSGTLHCPDQPSSWVGCKLSLVFLQYCIMANFFWLLVEGLYLHTLLVAMLPPRRCFLAYLLIGWGLPTVCIGAWTAARLYLEDTGCWDTNDHSVPWWVIRIPILISIIVNFVLFISIIRILLQKLTSPDVGGNDQSQYKRLAKSTLLLIPLFGVHYMVFAVFPISISSKYQILFELCLGSFQGLVVAVLYCFLNSEVQCELKRKWRSRCPTPSASRDYRVCGSSFSRNGSEGALQFHRGSRAQSFLQTETSVI

SEQ ID NO: 14074 - protein, 347 aa, Homo Sapiens
MGVVQYGDNPATHFNLKTHTNSRDLKTAIEKITQRGGLSNVGRAISFVTKNFFSKANGNRSGAPNVVVVMVDGWPTDKVEEASRLARESGINIFFITIEGAAENEKQYVVEPNFANKAVCRTNGFYSLHVQSWFGLHKTLQPLVKRVCDTDRLACSKTCLNSADIGFVIDGSSSVGTGNFRTVLQFVTNLTKEFEISDTDTRIGAVQYTYEQRLEFGFDKYSSKPDILNAIKRVGYWSGGTSTGAAINFALEQLFKKSKPNKRKLMILITDGRSYDDVRIPAMAAHLKGVITYAIGVAWAAQEELEVIATHPARDHSFFVDEFDNLHQYVPRIIQNICTEFNSQPRN

SEQ ID NO: 14075 - protein, 630 aa, Homo Sapiens
MRTVVLTMKASVIEMFLAVPQINCDVKAGKIIDPEFIVKCPAGCQDPKYHVYGTDVYASYSSVCGAAVHSGVLDNSGGKILVRKVAGQSGYKGSYSNGVQSLSLPRWRESFIVLESKPKKGVTYPSALTYSSSKSPAAQAGETTKAYQRPPIPGTTAQPVTLMQLLAVTVAVATPTTLPRPSPSAASTTSIPRPQSVGHRSQEMGEMDSWKPGSVLLDEGLVPKEELSTQSLEPVSLGDPNCKIDLSFLIDGSTSIGKRRFRIQKQLLADVAQALDIGPAGPLMGVVQYGDNPATHFNLKTHTNSRDLKTAIEKITQRGGLSNVGRAISFVTKNFFSKANGNRSGAPNVVVVMVDGWPTDKVEEASRLARESGINIFFITIEGAAENEKQYVVEPNFANKAVCRTNGFYSLHVQSWFGLHKTLQPLVKRVCDTDRLACSKTCLNSADIGFVIDGSSSVGTGNFRTVLQFVTNLTKEFEISDTDTRIGAVQYTYEQRLEFGFDKYSSKPDILNAIKRVGYWSGGTSTGAAINFALEQLFKKSKPNKRKLMILITDGRSYDDVRIPAMAAHLKGVITYAIGVAWAAQEELEVIATHPARDHSFFVDEFDNLHQYVPRIIQNICTEFNSQPRN

SEQ ID NO: 14076 - protein, 657 aa, Homo Sapiens
MRTVVLTMKASVIEMFLVLLVTGVHSNKETAKKIKRPKFTVPQINCDVKAGKIIDPEFIVKCPAGCQDPKYHVYGTDVYASYSSVCGAAVHSGVLDNSGGKILVRKVAGQSGYKGSYSNGVQSLSLPRWRESFIVLESKPKKGVTYPSALTYSSSKSPAAQAGETTKAYQRPPIPGTTAQPVTLMQLLAVTVAVATPTTLPRPSPSAASTTSIPRPQSVGHRSQEMDLWSTATYTSSQNRPRADPGIQRQDPSGAAFQKPVGADVSLDCKIDLSFLIDGSTSIGKRRFRIQKQLLADVAQALDIGPAGPLMGVVQYGDNPATHFNLKTHTNSRDLKTAIEKITQRGGLSNVGRAISFVTKNFFSKANGNRSGAPNVVVVMVDGWPTDKVEEASRLARESGINIFFITIEGAAENEKQYVVEPNFANKAVCRTNGFYSLHVQSWFGLHKTLQPLVKRVCDTDRLACSKTCLNSADIGFVIDGSSSVGTGNFRTVLQFVTNLTKEFEISDTDTRIGAVQYTYEQRLEFGFDKYSSKPDILNAIKRVGYWSGGTSTGAAINFALEQLFKKSKPNKRKLMILITDGRSYDDVRIPAMAAHLKGVITYAIGVAWAAQEELEVIATHPARDHSFFVDEFDNLHQYVPRIIQNICTEFNSQPRN

SEQ ID NO: 14077 - protein, 693 aa, Homo Sapiens
MRTVVLTMKASVIEMFLVLLVTGVHSNKETAKKIKRPKFTVPQINCDVKAGKIIDPEFIVKCPAGCQDPKYHVYGTDVYASYSSVCGAAVHSGVLDNSGGKILVRKVAGQSGYKGSYSNGVQSLSLPRWRESFIVLESKPKKGVTYPSALTYSSSKSPAAQAGETTKAYQRPPIPGTTAQPVTLMQLLAVTVAVATPTTLPRPSPSAASTTSIPRPQSVGHRSQEMDLWSTATYTSSQNRPRADPGIQRQDPSGAAFQKPVGADVSLGEMDSWKPGSVLLDEGLVPKEELSTQSLEPVSLGDPNCKIDLSFLIDGSTSIGKRRFRIQKQLLADVAQALDIGPAGPLMGVVQYGDNPATHFNLKTHTNSRDLKTAIEKITQRGGLSNVGRAISFVTKNFFSKANGNRSGAPNVVVVMVDGWPTDKVEEASRLARESGINIFFITIEGAAENEKQYVVEPNFANKAVCRTNGFYSLHVQSWFGLHKTLQPLVKRVCDTDRLACSKTCLNSADIGFVIDGSSSVGTGNFRTVLQFVTNLTKEFEISDTDTRIGAVQYTYEQRLEFGFDKYSSKPDILNAIKRVGYWSGGTSTGAAINFALEQLFKKSKPNKRKLMILITDGRSYDDVRIPAMAAHLKGVITYAIGVAWAAQEELEVIATHPARDHSFFVDEFDNLHQYVPRIIQNICTEFNSQPRN

SEQ ID NO: 14078 - protein, 678 aa, Homo Sapiens
MRTVVLTMKASVIEMFLVLLVTGVHSNKETAKKIKRPKFTVPQINCDVKAGKIIDPEFIVKCPAGCQDPKYHVYGTDVYASYSSVCGAAVHSGVLDNSGGKILVRKVAGQSGYKGSYSNGVQSLSLPRWRESFIVLESKPKKGVTYPSALTYSSSKSPAAQAGETTKAYQRPPIPGTTAQPVTLMQLLAVTVAVATPTTLPRPSPSAASTTSIPRPQSVGHRSQEMDLWSTATYTSSQNRPRADPGIQRQDPSGAAFQKPVGADVSLGLVPKEELSTQSLEPVSLGDPNCKIDLSFLIDGSTSIGKRRFRIQKQLLADVAQALDIGPAGPLMGVVQYGDNPATHFNLKTHTNSRDLKTAIEKITQRGGLSNVGRAISFVTKNFFSKANGNRSGAPNVVVVMVDGWPTDKVEEASRLARESGINIFFITIEGAAENEKQYVVEPNFANKAVCRTNGFYSLHVQSWFGLHKTLQPLVKRVCDTDRLACSKTCLNSADIGFVIDGSSSVGTGNFRTVLQFVTNLTKEFEISDTDTRIGAVQYTYEQRLEFGFDKYSSKPDILNAIKRVGYWSGGTSTGAAINFALEQLFKKSKPNKRKLMILITDGRSYDDVRIPAMAAHLKGVITYAIGVAWAAQEELEVIATHPARDHSFFVDEFDNLHQYVPRIIQNICTEFNSQPRN

SEQ ID NO: 14079 - protein, 656 aa, Homo Sapiens
MRTVVLTMKASVIEMFLVLLVTGVHSNKETAKKIKRPKFTVPQINCDVKAGKIIDPEFIVKCPAGCQDPKYHVYGTDVYASYSSVCGAAVHSGVLDNSGGKILVRKVAGQSGYKGSYSNGVQSLSLPRWRESFIVLESKPKKGVTYPSALTYSSSKSPAAQAGETTKAYQRPPIPGTTAQPVTLMQLLAVTVAVATPTTLPRPSPSAASTTSIPRPQSVGHRSQEMDLWSTATYTSSQNRPRADPGLVPKEELSTQSLEPVSLGDPNCKIDLSFLIDGSTSIGKRRFRIQKQLLADVAQALDIGPAGPLMGVVQYGDNPATHFNLKTHTNSRDLKTAIEKITQRGGLSNVGRAISFVTKNFFSKANGNRSGAPNVVVVMVDGWPTDKVEEASRLARESGINIFFITIEGAAENEKQYVVEPNFANKAVCRTNGFYSLHVQSWFGLHKTLQPLVKRVCDTDRLACSKTCLNSADIGFVIDGSSSVGTGNFRTVLQFVTNLTKEFEISDTDTRIGAVQYTYEQRLEFGFDKYSSKPDILNAIKRVGYWSGGTSTGAAINFALEQLFKKSKPNKRKLMILITDGRSYDDVRIPAMAAHLKGVITYAIGVAWAAQEELEVIATHPARDHSFFVDEFDNLHQYVPRIIQNICTEFNSQPRN

SEQ ID NO: 14080 - protein, 203 aa, Homo Sapiens
MRTVVLTMKASVIEMFLVLLVTGVHSNKETAKKIKRPKFTVPQINCDVKAGKIIDPEFIVKCPAGCQDPKYHVYGTDVYASYSSVCGAAVHSGVLDNSGGKILVRKVAGQSGYKGSYSNGVQSLSLPRWRESFIVLESKPKKGVTYPSALTYSSSKSPAAQAGKCSRVIESKPSESMNTRRVLGDSGEINILTGQAPLALAIF

SEQ ID NO: 14081 - protein, 134 aa, Homo Sapiens
  misc_feature (1)..(1): Xaa can be any naturally occurring amino acid
XTSSQNRPRADPGIQRQDPSGAAFQKPVGADVSLGLVPKEELSTQSLEPVSLGDPNCKIDLSFLIDGSTSIGKRRFRIQKQLLADVAQALDIGPAGPLMGVVQYGPLHWYWKNSPGNGEEWVGRETAPISQLST

SEQ ID NO: 14082 - protein, 92 aa, Homo Sapiens
MGSTWGSPGWVRLALCLTGLVLSLYALHVKAARARDRDYRALCDVGTAISCSRVFSSRLPADTLGLCPDAAELPGVSRWFCLPGLDPVLRAL

SEQ ID NO: 14083 - protein, 149 aa, Homo Sapiens
MGSTWGSPGWVRLALCLTGLVLSLYALHVKAARARDRDYRALCDVGTAISCSRVFSSRVQGTGLTVLTWFHPTPPLCQVGQGFRAGGACAGTGQHPQSIQQHIRLHLLHTTAIVRLPADTLGLCPDAAELPGVSRWFCLPGLDPVLRAL

SEQ ID NO: 14084 - protein, 156 aa, Homo Sapiens
MGSTWGSPGWVRLALCLTGLVLSLYALHVKAARARDRDYRALCDVGTAISCSRVFSSRWGRGFGLVEHVLGQDSILNQSNSIFGCIFYTLQLLLDGVSPCCPGWSQAICLPQPPKVLGGLQALPADTLGLCPDAAELPGVSRWFCLPGLDPVLRAL

SEQ ID NO: 14085 - protein, 163 aa, Homo Sapiens
MGSTWGSPGWVRLALCLTGLVLSLYALHVKAARARDRDYRALCDVGTAISCSRVFSSRWGRGFGLVEHVLGQDSILNQSNSIFGCIFYTLQLLLGCLRTRWASVLMLLSSLVSLAGSVYLAWILFFVLYDFCIVCITTYAINVSLMWLSFRKVQEPQGKAKRH

SEQ ID NO: 14086 - protein, 160 aa, Homo Sapiens
MIILESGIGVPGERTRGWTARGVVAQGLSYPAILVFEIRVRGKGPDSAGDWDYSGDSHVNWMPRNNGDQERRGGRMAVEIDDGLKDGAQVGQGFRAGGACAGTGQHPQSIQQHIRLHLLHTTAIVRLPADTLGLCPDAAELPGVSRWFCLPGLDPVLRAL

SEQ ID NO: 14087 - protein, 161 aa, Homo Sapiens
MIVERLGYCQGCVWPKEWFCECMGERETDHQEALVRQDPGGWEAAARMVPEIVSGEMLGSRIGSPYSLDPLIRWSLGPGCCNSYNRTWHRVGQGFRAGGACAGTGQHPQSIQQHIRLHLLHTTAIVRLPADTLGLCPDAAELPGVSRWFCLPGLDPVLRAL

SEQ ID NO: 14088 - protein, 43 aa, Homo Sapiens
MLLSSLVSLAGSVYLAWILFFVLYDFCIVCITTYAINVSLMWL

SEQ ID NO: 14089 - protein, 92 aa, Homo Sapiens
  misc_feature (1)..(1): Xaa can be any naturally occurring amino acid
XQGCVWPKEWFCECMGERETDHQEALVRQDPGGWEAAARMVPEIVSGEMLGSRIGSPYSLDPLIRWSLGPGCCNSYNRTWHRVACGHAGPLS

SEQ ID NO: 14090 - protein, 845 aa, Homo Sapiens
MGTSALWALWLLLALCWAPRESGATGTGRKAKCEPSQFQCTNGRCITLLWKCDGDEDCVDGSDEKNCVKKTCAESDFVCNNGQCVPSRWKCDGDPDCEDGSDESPEQCHMRTCRIHEISCGAHSTQCIPVSWRCDGENDCDSGEDEENCGNITCSPDEFTCSSGRCISRNFVCNGQDDCSDGSDELDCAPPTCGAHEFQCSTSSCIPISWVCDDDADCSDQSDESLEQCGRQPVIHTKCPASEIQCGSGECIHKKWRCDGDPDCKDGSDEVNCPSRTCRPDQFECEDGSCIHGSRQCNGIRDCVDGSDEVNCKNVNQCLGPGKFKCRSGECIDISKVCNQEQDCRDWSDEPLKECHINECLVNNGGCSHICKDLVIGYECDCAAGFELIDRKTCGDIDECQNPGICSQICINLKGGYKCECSRGYQMDLATGVCKAVGKEPSLIFTNRRDIRKIGLERKEYIQLVEQLRNTVALDADIAAQKLFWADLSQKAIFSASIDDKVGRHVKMIDNVYNPAAIAVDWVYKTIYWTDAASKTISVATLDGTKRKFLFNSDLREPASIAVDPLSGFVYWSDWGEPAKIEKAGMNGFDRRPLVTADIQWPNGITLDLIKSRLYWLDSKLHMLSSVDLNGQDRRIVLKSLEFLAHPLALTIFEDRVYWIDGENEAVYGANKFTGSELATLVNNLNDAQDIIVYHELVQPSGKNWCEEDMENGGCEYLCLPAPQINDHSPKYTCSCPSGYNVEENGRDCQRINVTTAVSEVSVPPKGTSAAWAILPLLLLVMAAVGGYLMWRNWQHKNMKSMNFDNPVYLKTTEEDLSIDIGRHSASVGHTYPAISVVSTDDDLA

SEQ ID NO: 14091 - protein, 873 aa, Homo Sapiens
MGTSALWALWLLLALCWAPRESGATGTGRKAKCEPSQFQCTNGRCITLLWKCDGDEDCVDGSDEKNCVKKTCAESDFVCNNGQCVPSRWKCDGDPDCEDGSDESPEQCHMRTCRIHEISCGAHSTQCIPVSWRCDGENDCDSGEDEENCGNITCSPDEFTCSSGRCISRNFVCNGQDDCSDGSDELDCAPPTCGAHEFQCSTSSCIPISWVCDDDADCSDQSDESLEQCGRQPVIHTKCPASEIQCGSGECIHKKWRCDGDPDCKDGSDEVNCPSRTCRPDQFECEDGSCIHGSRQCNGIRDCVDGSDEVNCKNVNQCLGPGKFKCRSGECIDISKVCNQEQDCRDWSDEPLKECHINECLVNNGGCSHICKDLVIGYECDCAAGFELIDRKTCGDIDECQNPGICSQICINLKGGYKCECSRGYQMDLATGVCKAVGKEPSLIFTNRRDIRKIGLERKEYIQLVEQLRNTVALDADIAAQKLFWADLSQKAIFSASIDDKVGRHVKMIDNVYNPAAIAVDWVYKTIYWTDAASKTISVATLDGTKRKFLFNSDLREPASIAVDPLSGFVYWSDWGEPAKIEKAGMNGFDRRPLVTADIQWPNGITLDLIKSRLYWLDSKLHMLSSVDLNGQDRRIVLKSLEFLAHPLALTIFEDRVYWIDGENEAVYGANKFTGSELATLVNNLNDAQDIIVYHELVQPSGKNWCEEDMENGGCEYLCLPAPQINDHSPKYTCSCPSGYNVEENGRDCQSTATTVTYSETKDTNTTEISATSGLVPGGINVTTAVSEVSVPPKGTSAAWAILPLLLLVMAAVGGYLMWRNWQHKNMKSMNFDNPVYLKTTEEDLSIDIGRHSASVGHTYPAISVVSTDDDLA

SEQ ID NO: 14092 - protein, 173 aa, Homo Sapiens
MGTSALWALWLLLALCWAPRESGATGTGRKAKCEPSQFQCTNGRCITLLWKCDGDEDCVDGSDEKNCVKKTCAESDFVCNNGQCVPSRWKCDGDPDCEDGSDESPEQCRNITCSPDEFTCSSGRCISRNFVCNGQDDCSDGSDELDCAPPTCGAHEFQCSTSSCIPISWVCDD

SEQ ID NO: 14093 - protein, 70 aa, Homo Sapiens
MERGAGAKLLPLLLLLRATGFTCAQTDGRNGYTAVIEVTSGGPWGDWAWPEMCPDGFFASGFSLKLGRME

SEQ ID NO: 14094 - protein, 102 aa, Homo Sapiens
MERGAGAKLLPLLLLLRATGFTCAQTDGRNGYTAVIEVTSGGPWGDWAWPEMCPDGFFASGFSLKVEPPQGIPGDDTALNGIRLHCARGNVLGNTHVLGRME

SEQ ID NO: 14095 - protein, 114 aa, Homo Sapiens
MERGAGAKLLPLLLLLRATGFTCAQTDGRNGYTAVIEVTSGGPWGDWAWPEMCPDGFFASGFSLKVEPPQGIPGDDTALNGIRLHCARGNVLGNTHVVESQSGRWGAGVEDPLG

SEQ ID NO: 14096 - protein, 202 aa, Homo Sapiens
MERGAGAKLLPLLLLLRATGFTCAQTDGRNGYTAVIEVTSGGPWGDWAWPEMCPDGFFASGFSLKVEPPQGIPGDDTALNGIRLHCARGNVLGNTHVVESQSGSWGEWSEPLWCRGGAYLVAFSLRVEAPTTLGDNTAANNVRFRCSDGEELQGPGLSWGDFGDWSDHCPKGACGLQTKIQGPRGLGDDTALNDARLFCCRS

SEQ ID NO: 14097 - protein, 513 aa, Homo Sapiens
MTTQLPAYVAILLFYVSRASCQDTFTAAVYEHAAILPNATLTPVSREEALALMNRNLDILEGAITSAADQGAHIIVTPEDAIYGWNFNRDSLYPYLEDIPDPEVNWIPCNNRNRFGQTPVQERLSCLAKNNSIYVVANIGDKKPCDTSDPQCPPDGRYQYNTDVVFDSQGKLVARYHKQNLFMGENQFNVPKEPEIVTFNTTFGSFGIFTCFDILFHDPAVTLVKDFHVDTIVFPTAWMNVLPHLSAVEFHSAWAMGMRVNFLASNIHYPSKKMTGSGIYAPNSSRAFHYDMKTEEGKLLLSQLDSHPSHSAVVNWTSYASSIEALSSGNKEFKGTVFFDEFTFVKLTGVAGNYTVCQKDLCCHLSYKMSENIPNEVYALGAFDGLHTVEGRYYLQICTLLKCKTTNLNTCGDSAETASTRFEMFSLSGTFGTQYVFPEVLLSENQLAPGEFQVSTDGRLFSLKPTSGPVLTVTLFGRLYEKDWASNASSGLTAQARIIMLIVIAPIVCSLSW

SEQ ID NO: 14098 - protein, 102 aa, Homo Sapiens
MNENIDILETAIKQAAEQGARIIVTPEDALYGWKFTRETVFPYLEDIPDPQVNWIPCQDPHRFGHTPVQARLSCLAKDNSIYVLANLGDKKPCNSRDSTCPP

SEQ ID NO: 14099 - protein, 131 aa, Homo Sapiens
MNENIDILETAIKQAAEQGARIIVTPEDALYGWKFTRETVFPYLEDIPDPQVNWIPCQDPHRFGHTPVQARLSCLAKDNSIYVLANLGDKKPCNSRDSTCPPNGYFQYNTNVVYNTEGKLVARYHKVGKSH

SEQ ID NO: 14100 - protein, 467 aa, Homo Sapiens
MNENIDILETAIKQAAEQGARIIVTPEDALYGWKFTRETVFPYLEDIPDPQVNWIPCQDPHRFGHTPVQARLSCLAKDNSIYVLANLGDKKPCNSRDSTCPPNGYFQYNTNVVYNTEGKLVARYHKYHLYSEPQFNVPEKPELVTFNTAFGRFGIFTCFDIFFYDPGVTLVKDFHVDTILFPTAWMNVLPLLTAIEFHSAWAMGMGVNLLVANTHHVSLNMTGSGIYAPNGPKVYHYDMKTELGKLLLSEVDSHPLSSLAYPTAVNWNAYATTIKPFPVQKNTFRGFISRDGFNFTELFENAGNLTVCQKELCCHLSYRMLQKEENEVYVLGAFTGLHGRRRREYWQVCTLLKCKTTNLTTCGRPVETASTRFEMFSLSGTFGTEYVFPEVLLTEIHLSPGKFEVLKDGRLVNKNGSSGPILTVSLFGRWYTKDSLYSSCGTSNSAITYLLIFILLMIIALQNIVML

SEQ ID NO: 14101 - protein, 101 aa, Homo Sapiens
MVTSSFPISVAVFALITLQVGTQDSFIAAVYEHAVILPNKTETPVSQEDALNLMNENIDILETAIKQAAEQGARIIVTPEDALYGWKFTRETVFPYLEDIP

SEQ ID NO: 14102 - protein, 166 aa, Homo Sapiens
MVTSSFPISVAVFALITLQVGTQDSFIAAVYEHAVILPNKTETPVSQEDALNLMNENIDILETAIKQAAEQGARIIVTPEDALYGWKFTRETVFPYLEDIPDPQVNWIPCQDPHRFGHTPVQARLSCLAKDNSIYVLANLGDKKPCNSRDSTCPPNGYFQYNTNVV

SEQ ID NO: 14103 - protein, 192 aa, Homo Sapiens
MVTSSFPISVAVFALITLQVGTQDSFIAAVYEHAVILPNKTETPVSQEDALNLMNENIDILETAIKQAAEQGARIIVTPEDALYGWKFTRETVFPYLEDIPDPQVNWIPCQDPHRFGHTPVQARLSCLAKDNSIYVLANLGDKKPCNSRDSTCPPNGYFQYNTNVVYNTEGKLVARYHKETLQSVKRSFAVI

SEQ ID NO: 14104 - protein, 195 aa, Homo Sapiens
MVTSSFPISVAVFALITLQVGTQDSFIAAVYEHAVILPNKTETPVSQEDALNLMNENIDILETAIKQAAEQGARIIVTPEDALYGWKFTRETVFPYLEDIPDPQVNWIPCQDPHRFGHTPVQARLSCLAKDNSIYVLANLGDKKPCNSRDSTCPPNGYFQYNTNVVYNTEGKLVARYHKEVVFMHQMVPKCIIMT

SEQ ID NO: 14105 - protein, 299 aa, Homo Sapiens
MVTSSFPISVAVFALITLQVGTQDSFIAAVYEHAVILPNKTETPVSQEDALNLMNENIDILETAIKQAAEQGARIIVTPEDALYGWKFTRETVFPYLEDIPDPQVNWIPCQDPHRFGHTPVQARLSCLAKDNSIYVLANLGDKKPCNSRDSTCPPNGYFQYNTNVVYNTEGKLVARYHKVCTLLKCKTTNLTTCGRPVETASTRFEMFSLSGTFGTEYVFPEVLLTEIHLSPGKFEVLKDGRLVNKNGSSGPILTVSLFGRWYTKDSLYSSCGTSNSAITYLLIFILLMIIALQNIVML

SEQ ID NO: 14106 - protein, 184 aa, Homo Sapiens
MVTSSFPISVAVFALITLQVGTQDSFIAAVYEHAVILPNKTETPVSQEDALNLMNENIDILETAIKQAAEQGARIIVTPEDALYGWKFTRETVFPYLEDIPDPQVNWIPCQDPHRFGHTPVQARLSCLAKDNSIYVLANLGDKKPCNSRDSTCPPNGYFQYNTNVVYNTEGKLVARYHKVGKSH

SEQ ID NO: 14107 - protein, 520 aa, Homo Sapiens
MVTSSFPISVAVFALITLQVGTQDSFIAAVYEHAVILPNKTETPVSQEDALNLMNENIDILETAIKQAAEQGARIIVTPEDALYGWKFTRETVFPYLEDIPDPQVNWIPCQDPHRFGHTPVQARLSCLAKDNSIYVLANLGDKKPCNSRDSTCPPNGYFQYNTNVVYNTEGKLVARYHKYHLYSEPQFNVPEKPELVTFNTAFGRFGIFTCFDIFFYDPGVTLVKDFHVDTILFPTAWMNVLPLLTAIEFHSAWAMGMGVNLLVANTHHVSLNMTGSGIYAPNGPKVYHYDMKTELGKLLLSEVDSHPLSSLAYPTAVNWNAYATTIKPFPVQKNTFRGFISRDGFNFTELFENAGNLTVCQKELCCHLSYRMLQKEENEVYVLGAFTGLHGRRRREYWQVCTLLKCKTTNLTTCGRPVETASTRFEMFSLSGTFGTEYVFPEVLLTEIHLSPGKFEVLKDGRLVNKNGSSGPILTVSLFGRWYTKDSLYSSCGTSNSAITYLLIFILLMIIALQNIVML

SEQ ID NO: 14108 - protein, 290 aa, Homo Sapiens
MVTSSFPISVAVFALITLQVGTQDSFIAAVYEHAVILPNKTETPVSQEDALNLMNENIDILETAIKQAAEQGARIIVTPEDALYGWKFTRETVFPYLEDIPDPQVNWIPCQDPHRFGHTPVQARLSCLAKDNSIYVLANLGDKKPCNSRDSTCPPNGYFQYNTNVVYNTEGKLVARYHKYHLYSEPQFNVPEKPELVTFNTAFGRFGIFTCFDIFFYDPGVTLVKDFHVDTILFPTAWMNVLPLLTAIEFHSAWAMGMGVNLLVANTHHVSLNMTVVFMHQMVPKCIIMT

SEQ ID NO: 14109 - protein, 219 aa, Homo Sapiens
MVTSSFPISVAVFALITLQVGTQDSFIAAVYEHAVILPNKTETPVSQEDALNLMNENIDILETAIKQAAEQGARIIVTPEDALYGWKFTRETVFPYLEDIPDPQVNWIPCQDPHRFGHTPVQARLSCLAKDNSIYVLANLGDKKPCNSRDSTCPPNGYFQYNTNVVYNTEGKLVARYHKYHLYSEPQFNVPEKPELVTFNTAFGRKWYLCTKWSQSVSL

SEQ ID NO: 14110 - protein, 216 aa, Homo Sapiens
MVTSSFPISVAVFALITLQVGTQDSFIAAVYEHAVILPNKTETPVSQEDALNLMNENIDILETAIKQAAEQGARIIVTPEDALYGWKFTRETVFPYLEDIPDPQVNWIPCQDPHRFGHTPVQARLSCLAKDNSIYVLANLGDKKPCNSRDSTCPPNGYFQYNTNVVYNTEGKLVARYHKYHLYSEPQFNVPEKPELVTFNTAFGSLDERFAPFDSY

SEQ ID NO: 14111 - protein, 119 aa, Homo Sapiens
MVTSSFPISVAVFALITLQVGTQDSFIAAVYEHAVILPNKTETPVSQEDALNLMNENIDILETAIKQAAEQGARIIVTPEDALYGWKFTRETVFPYLEDIPDPQVNWIPCQDPHRSAHC

SEQ ID NO: 14112 - protein, 129 aa, Homo Sapiens
MIISHFPKCVAVFALLALSVGALDTFIAAVYEHAVILPNRTETPVSKEEALLLMNKNIDVLEKAVKLAAKQGAHIIVTPEDGIYGWIFTRESIYPYLEDIPDPGVNWIPCRDPWREWNLRPRSSQGVPL

SEQ ID NO: 14113 - protein, 129 aa, Homo Sapiens; identical to SEQ ID NO: 14112

SEQ ID NO: 14114 - protein, 207 aa, Homo Sapiens
MIISHFPKCVAVFALLALSVGALDTFIAAVYEHAVILPNRTETPVSKEEALLLMNKNIDVLEKAVKLAAKQGAHIIVTPEDGIYGWIFTRESIYPYLEDIPDPGVNWIPCRDPWRFGNTPVQQRLSCLAKDNSIYVVANIGDKKPCNASDSQCPPDGRYQYNTDVVFDSQGKLLARYHKGVESTPQKQSRCTTMTWKQRVVSCCYQN

SEQ ID NO: 14115 - protein, 274 aa, Homo Sapiens
MIISHFPKCVAVFALLALSVGALDTFIAAVYEHAVILPNRTETPVSKEEALLLMNKNIDVLEKAVKLAAKQGAHIIVTPEDGIYGWIFTRESIYPYLEDIPDPGVNWIPCRDPWRFGNTPVQQRLSCLAKDNSIYVVANIGDKKPCNASDSQCPPDGRYQYNTDVVFDSQGKLLARYHKYNLFAPEIQFDFPKDSELVTFDTPFGKFGIFTCFDIFSHDPAVVVVDEFQLTAFSTPQHGTTRCPSSRLFPSIQHGPRPWESIYLLQIPTTPACT

SEQ ID NO: 14116 - protein, 147 aa, Homo Sapiens
MIISHFPKCVAVFALLALSVGALDTFIAAVYEHAVILPNRTETPVSKEEALLLMNKNIDVLEKAVKLAAKQGAHIIVTPEDGIYGWIFTRESIYPYLEDIPDPGVNWIPCRDPWRKSKKMNEPVSKELCYHCHSECNQYGQWKLYRT

SEQ ID NO: 14117 - protein, 117 aa, Homo Sapiens
MIISHFPKCVAVFALLALSVGALDTFIAAVYEHAVILPNRTETPVSKEEALLLMNKNIDVLEKAVKLAAKQGAHIIVTPEDGIYGWIFTRESIYPYLEDIPDPGVNWIPCRDPWRNH

SEQ ID NO: 14118 - protein, 117 aa, Homo Sapiens; identical to SEQ ID NO: 14117

SEQ ID NO: 14119 - protein, 117 aa, Homo Sapiens; identical to SEQ ID NO: 14117

SEQ ID NO: 14120 - protein, 133 aa, Homo Sapiens
MIISHFPKCVAVFALLALSVGALDTFIAAVYEHAVILPNRTETPVSKEEALLLMNKNIDVLEKAVKLAAKQGAHIIVTPEDGIYGWIFTRESIYPYLEDIPDPGVNWIPCRDPWSTIFLHLKFSLISPRIQNL

SEQ ID NO: 14121 - protein, 169 aa, Homo Sapiens
MIISHFPKCVAVFALLALSVGALDTFIAAVYEHAVILPNRTETPVSKEEALLLMNKNIDVLEKAVKLAAKQQGAHIIVTPEDGIYGWIFTRESIYPYLEDIPDPGVNWIPCRDPWSMVQHAAPPLGCSLPFSMGQGHGSQSTCCKYPQHQHAHDREWNLRPRSSQGVPL

SEQ ID NO: 14122 - protein, 161 aa, Homo Sapiens
MIISHFPKCVAVFALLALSVGALDTFIAAVYEHAVILPNRTETPVSKEEALLLMNKNIDVLEKAVKLAAKQVLPFYTCKGDLQFGQRVFGIHDKLFCPTCFEQGAHIIVTPEDGIYGWIFTRESIYPYLEDIPDPGVNWIPCRDPWREWNLRPRSSQGVPL

SEQ ID NO: 14123 - protein, 60 aa, Homo Sapiens
  misc_feature (1)..(1): Xaa can be any naturally occurring amino acid
XTRESIYPYLEDIPDPGVNWIPCRDPWRKSKKMNEPVSKELCYHCHSECNQYGQWKLYRT

SEQ ID NO: 14124 - protein, 155 aa, Homo Sapiens
MCTEAKKHCWYFEGLYPTYYICRSYEDCCGSRCCVRALSIQRLWYFWFLLMMGVLFCCGAGFFIRRRMYPPPLIEEPAFNVSYTRQPPNPGPGAQQPGPPYYTDPGGPGMNPVGNSMAMAFQVPPNSPQGSVACPPPPAYCNTPPPPYEQVVKAK

SEQ ID NO: 14125 - protein, 109 aa, Homo Sapiens
MFLLMMGVLFCCGAGFFIRRRMYPPPLIEEPAFNVSYTRQPPNPGPGAQQPGPPYYTDPGGPGMNPVGNSMAMAFQVPPNSPQGSVACPPPPAYCNTPPPPYEQVVKAK

SEQ ID NO: 14126 - protein, 169 aa, Homo Sapiens
MLSETLGYLSSVLLQCTEAKKHCWYFEGLYPTYYICRSYEDCCGSRCCVRALSIQRLWYFWFLLMMGVLFCCGAGFFIRRRMYPPPLIEEPAFNVSYTRQPPNPGPGAQQPGPPYYTDPGGPGMNPVGNSMAMAFQVPPNSPQGSVACPPPPAYCNTPPPPYEQVVKAK

SEQ ID NO: 14127 - protein, 22 aa, Homo Sapiens
MMGVLFCCGAGFFIRRRMYPPP

SEQ ID NO: 14128 - protein, 53 aa, Homo Sapiens
MMGVLFCCGAGFFIRRRMYPPPLIEEPAFNVSYTRQPPNPGPGAQQPGPPYYT

SEQ ID NO: 14129 - protein, 85 aa, Homo Sapiens
MMGVLFCCGAGFFIRRRMYPPPLIEEPAFNVSYTRQPPNPGPGAQQPGPPYYTDPGGPGMNPVGNSMAMAFQVPPNSPQGSVACP

SEQ ID NO: 14130 - protein, 96 aa, Homo Sapiens
MMGVLFCCGAGFFIRRRMYPPPLIEEPAFNVSYTRQPPNPGPGAQQPGPPYYTDPGGPGMNPVGNSMAMAFQVPPNSPQGSVACPPPPAYCNTPPP

SEQ ID NO: 14131 - protein, 105 aa, Homo Sapiens
MMGVLFCCGAGFFIRRRMYPPPLIEEPAFNVSYTRQPPNPGPGAQQPGPPYYTDPGGPGMNPVGNSMAMAFQVPPNSPQGSVACPPPPAYCNTPPPPYEQVVKAK

SEQ ID NO: 14132 - protein, 105 aa, Homo Sapiens; identical to SEQ ID NO: 14131

SEQ ID NO: 14133 - protein, 105 aa, Homo Sapiens; identical to SEQ ID NO: 14131

SEQ ID NO: 14134 - protein, 170 aa, Homo Sapiens
MRIRSLHPVQQTEPTTCTEAKKHCWYFEGLYPTYYICRSYEDCCGSRCCVRALSIQRLWYFWFLLMMGVLFCCGAGFFIRRRMYPPPLIEEPAFNVSYTRQPPNPGPGAQQPGPPYYTDPGGPGMNPVGNSMAMAFQVPPNSPQGSVACPPPPAYCNTPPPPYEQVVKAK

SEQ ID NO: 14135 - protein, 172 aa, Homo Sapiens
MRRQPAKVAALLLGLLLECTEAKKHCWYFEGLYPTYYICRSYEDCCGSRCCVRALSIQRLWYFWFLLMMGVLFCCGAGFFIRRRMYPPPLIEEPAFNVSYTRQPPNPGPGAQQPGPPYYTDPGGPGMNPVGNSMAMAFQVPPNSPQGSVACPPPPAYCNTPPPPYEQVVKAK

SEQ ID NO: 14136 - protein, 163 aa, Homo Sapiens
MRRTGSHAQCTEAKKHCWYFEGLYPTYYICRSYEDCCGSRCCVRALSIQRLWYFWFLLMMGVLFCCGAGFFIRRRMYPPPLIEEPAFNVSYTRQPPNPGPGAQQPGPPYYTDPGGPGMNPVGNSMAMAFQVPPNSPQGSVACPPPPAYCNTPPPPYEQVVKAK

SEQ ID NO: 14137 - protein, 144 aa, Homo Sapiens
MSAPCPGLLSCSCCLSTAQPVLHQPPAMSSALGTTIRLTCTLRNDHDIGVYSVYWYQQRPGHPPRFLLRYFSQSDKSQGPQVPPRFSGSKDVARNRGYLSISELQPEDEAMYYCAMGARSSEKEEREREWEEEMEPTAARTRVP

SEQ ID NO: 14138 - protein, 145 aa, Homo Sapiens
MSWAPVLLMLFVYCTGCGPQPVLHQPPAMSSALGTTIRLTCTLRNDHDIGVYSVYWYQQRPGHPPRFLLRYFSQSDKSQGPQVPPRFSGSKDVARNRGYLSISELQPEDEAMYYCAMGARSSEKEEREREWEEEMEPTAARTRVP

SEQ ID NO: 14139 - protein, 107 aa, Homo Sapiens
MACRCLSFLLMGTFLSGQVAQLSCTLSPQHVTIRDYGVSWYQQRAGSAPRYLLYYRSEEDHHRPADIPDRFSAAKDEAHNACVLTISPVQPEDDADYYCSVGYGFSP

SEQ ID NO: 14140 - protein, 123 aa, Homo Sapiens
MACRCLSFLLMGTFLSVSQTVLAQLDALLVFPGQVAQLSCTLSPQHVTIRDYGVSWYQQRAGSAPRYLLYYRSEEDHHRPADIPDRFSAAKDEAHNACVLTISPVQPEDDADYYCSVGYGFSP

SEQ ID NO: 14141 - protein, 271 aa, Homo Sapiens
MAGAGSEARFAGLSLVQLNELLEDEGQLTEMVQKMEENVQLNKEMTLASNRSLAEGNLLYQPQLDTLKARLTQKYQELQVLFEAYQIKKTKLDRQSSSASLETLLALLQAEGAKIEEDTENMAEKFLDGELPLDSFIDVYQSKRKLAHMRRVKIEKLQEMVLKGQRLPQALAPLPPRLPELAPTAPLPYPAPEASGPPAVAPRRIPPPPPPVPAGRLATPFTAAMSSGQAVPYPGLQCPPLPPRVGLPTQQGFSSQFVSPYPPPLPQRPPP

SEQ ID NO: 14142 - protein, 285 aa, Homo Sapiens
MAGAGSEARFAGLSLVQLNELLEDEGQLTEMVQKMEETQNVQLNKEMTLASNRSLAEGNLLYQPQLDTLKARLTQKYQELQVLFEAYQIKKTKLDRQSSSASLETLLALLQAEGAKIEEDTENMAEKFLDGELPLDSFIDVYQSKRKLAHMRRVKIEKLQEMVLKGQRLPQALAPLPPRLPELAPTAPLPYPAPEASGPPAVAPRRIPPPPPPVPAGRLATPFTAAMSSGQAVPYPGLQCPPLPPRVGLPTQQGFSSQFVSPYPPPLPQRPPPRLPPHQPGFILQ

SEQ ID NO: 14143 - protein, 184 aa, Homo Sapiens
MQSGCVLELRNAGLVACLALITVFVAECCYGDSCQTQNVQLNKEMTLASNRSLAEGNLLYQPQLDTLKARLTQKYQELQVLFEAYQIKKTKLDRQSSSASLETLLALLQAEGAKIEEDTENMAEKFLDGELPLDSFIDVYQSKRKLAHMRRVKIEKLQEMVLKGQRLPQALAPLPPRLPELAPT

SEQ ID NO: 14144 - protein, 334 aa, Homo Sapiens
MAAAAAAGPSPGSGPGDSPEGPEGEAPERRRKAHGMLKLYYGLSEGEAAGRPAGPDPLDPTDLNGAHFDPEVYLDKLRRECPLAQLMDSETDMVRQIRALDSDMQTLVYENYNKFISATDTIRKMKNDFRKMEDEMDRLATNMAVITDFSARISATLQDRHERITKLAGGRCRAGPAVGLSWGSGANVTLRPPGVHALLRKLQFLFELPSRLTKCVELGAYGQAVRYQGRAQAVLQQYQHLPSFRAIQDDCQVITARLAQQLRQRFREGGSGAPEQAECVELLLALGEPAEELCEEFLAHARGRLEKELRNLEAELGPSPPAPDVLEFTDHGGS

SEQ ID NO: 14145 - protein, 782 aa, Homo Sapiens
MAAAAAAGPSPGSGPGDSPEGPEGEAPERRRKAHGMLKLYYGLSEGEAAGRPAGPDPLDPTDLNGAHFDPEVYLDKLRRECPLAQLMDSETDMVRQIRALDSDMQTLVYENYNKFISATDTIRKMKNDFRKMEDEMDRLATNMAVITDFSARISATLQDRHERITKLAGVHALLRKLQFLFELPSRLTKCVELGAYGQAVRYQGRAQAVLQQYQHLPSFRAIQDDCQVITARLAQQLRQRFREGGSGAPEQAECVELLLALGEPAEELCEEFLAHARGRLEKELRNLEAELGPSPPAPDVLEFTDHGGSGFVGGLCQVAAAYQELFAAQGPAGAEKLAAFARQLGSRYFALVERRLAQEQGGGDNSLLVRALDRFHRRLRAPGALLAAAGLADAATEIVERVARERLGHHLQGLRAAFLGCLTDVRQALAAPRVAGKEGPGLAELLANVASSILSHIKASLAAVHLFTAKEVSFSNKPYFRGEFCSQGVREGLIVGFVHSMCQTAQSFCDSPGEKGGATPPALLLLLSRLCLDYETATISYILTLTDEQFLVQDQFPVTPVSTLCAEARETARRLLTHYVKVQGLVISQMLRKSVETRDWLSTLEPRNVRAVMKRVVEDTTAIDVQVGLLYEEGVRKAQSSDSSKRTFSVYSSSRQQGRYAPSYTPSAPMDTNLLSNIQKLFSERIDVFSPVEFNKVSVLTGIIKISLKTLLECVRLRTFGRFGLQQVQVDCHFLQLYLWRFVADEELVHLLLDEVVASAALRCPDPVPMEPSVVEVICERG

SEQ ID NO: 14146 - protein, 163 aa, Homo Sapiens
MAAAAAAGPSPGSGPGDSPEGPEGEAPERRRKAHGMLKLYYGLSEGEAAGRPAGPDPLDPTDLNGAHFDPEVYLDKLRRECPLAQLMDSETDMVRQIRALDSDMQTLVYENYNKFISATGSALDTQMRLGASGPCLGCLWSDGAVEAQWWQLAKHLRPASDLD

SEQ ID NO: 14147 - protein, 233 aa, Homo Sapiens
MAAAAAAGPSPGSGPGDSPEGPEGEAPERRRKAHGMLKLYYGLSEGEAAGRPAGPDPLDPTDLNGAHFDPEVYLDKLRRECPLAQLMDSETDMVRQIRALDSDMQTLVYENYNKFISATGVHALLRKLQFLFELPSRLTKCVELGAYGQAVRYQGRAQAVLQQYQHLPSFRAIQDDCQVITARLAQQLRQRFREGGSGAPEQAECVELLLALGEPAEELCEEFLAHARGRLEK

SEQ ID NO: 14148 - protein, 81 aa, Homo Sapiens
MAAAAAAGPSPGSGPGDSPEGPEGEAPERRRKAHGMLKLYYGLSEGEAAGRPAGPDPLDPTDLNGAHFDPEVYLDKTPSGR

SEQ ID NO: 14149 - protein, 81 aa, Homo Sapiens [sequence omitted]

SEQ ID NO: 14150 - protein, 110 aa, Homo Sapiens
MDSETDMVRQIRALDSDMQTLVYENYNKFISATDTIRKMKNDFRKMEDEMDRLATNMAVITDFSARISATLQDRHERITKLAGVHALLRKLQFLFELPSRLTKCVELGAY

SEQ ID NO: 14151 - protein, 255 aa, Homo Sapiens
MDSETDMVRQIRALDSDMQTLVYENYNKFISATDTIRKMKNDFRKMEDEMDRLATNMAVITDFSARISATLQDRHERITKLAGVHALLRKLQFLFELPSRLTKCVELGAYGQAVRYQGRAQAVLQQYQHLPSFRAIQDDCQVITARLAQQLRQRFREGGSGAPEQAECVELLLALGEPAEELCEEFLAHARGRLEKELRNLEAELGPSPPAPDVLEFTDHGGSGFVGGLCQVAAAYQELFAAQGPAGAEKLAAFA

SEQ ID NO: 14152 - protein, 165 aa, Homo Sapiens
MIMPLYSKLGDREKKKRKEKASRPWAAVGTMAAAAAAGPSPGSGPGDSPEGPEGEAPERRRKAHGMLKLYYGLSEGEAAGRPAGPDPLDPTDLNGAHFDPEVYLDKLRRECPLAQLMDSETDMVRQIRALDSDMQTLVYENYNKFISATDTIRKMKNDFRKMEDE

SEQ ID NO: 14153 - protein, 99 aa, Homo Sapiens
VGLLYEEGVRKAQSSDSSKRTFSVYSSSRQQGRYAPSYTPSAPMDTNLLSNIQKLFSERIDVFSPVEFNKMTALILYPSLLIWPRRLSASSQLLPSCRC

SEQ ID NO: 14154 - protein, 72 aa, Homo Sapiens
  misc_feature (1)..(1): Xaa can be any naturally occurring amino acid
XSQGVREGLIVGFVHSMCQTAQSFCDSPGEKGGATPPALLLLLSRLCLDYETATISYILTLTDEQFLVQVKH

SEQ ID NO: 14155 - protein, 199 aa, Homo Sapiens
  misc_feature (1)..(1): Xaa can be any naturally occurring amino acid
XTAQSFCDSPGEKGGATPPALLLLLSRLCLDYETATISYILTLTDEQFLVQDQFPVTPVSTLCAEARETARRLLTHYVKVQGLVISQMLRKSVETRDWLSTLEPRNVRAVMKRVVEDTTAIDVQVGLLYEEGVRKAQSSDSSKRTFSVYSSSRQQGRYAPSYTPSAPMDTNLLSNIQKLFSERIDVFSPVEFNKVRLPT

SEQ ID NO: 14156 - protein, 168 aa, Homo Sapiens
MVFAFWKVFLILSCLAGQVSVVQVTIPDGFVNVTVGSNVTLICIYTTTVASREQLSIQWSFFHKKEMEPISHSSCLSTEGMEEKAVSQCLKMTHARDARGRCSWTSEIYFSQGGQAVAIGQFKDRITGSNDPGNASITISHMQPADSGIYICDVNNPPDFLGQNQGIL

SEQ ID NO: 14157 - protein, 423 aa, Homo Sapiens
MVFAFWKVFLILSCLAGQVSVVQVTIPDGFVNVTVGSNVTLICIYTTTVASREQLSIQWSFFHKKEMEPISHSSCLSTEGMEEKAVSQCLKMTHARDARGRCSWTSEIYFSQGGQAVAIGQFKDRITGSNDPGNASITISHMQPADSGIYICDVNNPPDFLGQNQGILNVSVLVKPSKPLCSVQGRPETGHTISLSCLSALGTPSPVYYWHKLEGRDIVPVKENFNPTTGILVIGNLTNFEQGYYQCTAINRLGNSSCEIDLTSSHPEVGIIVGALIGSLVGAAIIISVVCFARNKAKAKAKERNSKTIAELEPMTKINPRGESEAMPREDATQLEVTLPSSIHETGPDTIQEPDYEPKPTQEPAPEPAPGSEPMAVPDLDIELELEPETQSELEPEPEPEPESEPGVVVEPLSEDEKGVVKA

SEQ ID NO: 14158 - protein, 387 aa, Homo Sapiens
MVFAFWKVFLILSCLAGQVSVVQVTIPDGFVNVTVGSNVTLICIYTTTVASREQLSIQWSFFHKKEMEPISIYFSQGGQAVAIGQFKDRITGSNDPGNASITISHMQPADSGIYICDVNNPPDFLGQNQGILNVSVLVKPSKPLCSVQGRPETGHTISLSCLSALGTPSPVYYWHKLEGRDIVPVKENFNPTTGILVIGNLTNFEQGYYQCTAINRLGNSSCEIDLTSSHPEVGIIVGALIGSLVGAAIIISVVCFARNKAKAKAKERNSKTIAELEPMTKINPRGESEAMPREDATQLEVTLPSSIHETGPDTIQEPDYEPKPTQEPAPEPAPGSEPMAVPDLDIELELEPETQSELEPEPEPEPESEPGVVVEPLSEDEKGVVKA

SEQ ID NO: 14159 - protein, 190 aa, Homo Sapiens
MAAGGSAPEPRVLVCLGALLAGWVAVGLEAVVIGEVHENVTLHCGNISGLRGQVTWYRNNSEPVFLLSSNSSLRPAEPRFSLVDATSLHIESLSLGDEGIYTCQEILNVTQWFQVWLQVANPPPSAPQCWAQMASGSFMLQLTCRWDGGYPDPDFLWIEEPGGVIVGKSKLGVEMLSESQLSDGKKFKCV

SEQ ID NO: 14160 - protein, 540 aa, Homo Sapiens
MAAGGSAPEPRVLVCLGALLAGWVAVGLEAVVIGEVHENVTLHCGNISGLRGQVTWYRNNSEPVFLLSSNSSLRPAEPRFSLVDATSLHIESLSLGDEGIYTCQEILNVTQWFQVWLQVASGPYQIEVHIVATGTLPNGTLYAARGSQVDFSCNSSSRPPPVVEWWFQALNSSSESFGHNLTVNFFSLLLISPNLQGNYTCLALNQLSKRHRKVTTELLVYYPPPSAPQCWAQMASGSFMLQLTCRWDGGYPDPDFLWIEEPGGVIVGKSKLGVEMLSESQLSDGKKFKCVTSHIVGPESGASCMVQIRGPSLLSEPMKTCFTGGNVTLTCQVSGAYPPAKILWLRNLTQPEVIIQPSSRHLITQDGQNSTLTIHNCSQDLDEGYYICRADSPVGVREMEIWLSVKEPLNIGGIVGTIVSLLLLGLAIISGLLLHYSPVFCWKVGNTSRGQNMDDVMVLVDSEEEEEEEEEEEEDAAVGEQEGAREREELPKEIPKQDHIHRVTALVNGNIEQMGNGFQDLQDDSSEEQSDIVQEEDRPV

SEQ ID NO: 14161 - protein, 126 aa, Homo Sapiens
EFPFTDLKPKDAGRYFCAYKTTASHEWSESSEHLQLVVTDKHDELEAPSMKTGSSSEESTKRTSHSKLPEQEAAEADLSNMERVSLSTADPQGVTYAELSTSALSEAASDTTQEPPGSHEYAALKV

SEQ ID NO: 14162 - protein, 116 aa, Homo Sapiens
MTAEFLSLLCLDTRTIFVAIFSCISILLLFLSVFIIYRCSQHSSSSEESTKRTSHSKLPEQEAAEADLSNMERVSLSTADPQGVTYAELSTSALSEAASDTTQEPPGSHEYAALKV

SEQ ID NO: 14163 - protein, 174 aa, Homo Sapiens
MTAEFLSLLCLGLCLGYEDEKKNEKPPKPSLHAWPSSVVEAESNVTLKCQAHSQNVTFVLRKVNDSGYKQEQSSAENEAEFPFTDLKPKDAGRYFCAYKTTASHEWSESSEHLQLVVTDKHDELEAPSMKTDTRTIFVAIFSCISILLLFLSVFIIYRCSQHSELRERKGREGE

SEQ ID NO: 14164 - protein, 236 aa, Homo Sapiens
MTAEFLSLLCLGLCLGYEDEKKNEKPPKPSLHAWPSSVVEAESNVTLKCQAHSQNVTFVLRKVNDSGYKQEQSSAENEAEFPFTDLKPKDAGRYFCAYKTTASHEWSESSEHLQLVVTDKHDELEAPSMKTDTRTIFVAIFSCISILLLFLSVFIIYRCSQHSSSSEESTKRTSHSKLPEQEAAEADLSNMERVSLSTADPQGVTYAELSTSALSEAASDTTQEPPGSHEYAALKV

SEQ ID NO: 14165 - protein, 205 aa, Homo Sapiens
MTAEFLSLLCLGLCLGYEDEKKNEKPPKPSLHAWPSSVVEAESNVTLKCQAHSQNVTFVLRKVNDSGYKQEQSSAENEAEFPFTDLKPKDAGRYFCAYKTTASHEWSESSEHLQLVVTDKHDELEAPSMKTGSSSEESTKRTSHSKLPEQEAAEADLSNMERVSLSTADPQGVTYAELSTSALSEAASDTTQEPPGSHEYAALKV

SEQ ID NO: 14166 - protein, 143 aa, Homo Sapiens
MTAEFLSLLCLGLCLGYEDEKKNEKPPKPSLHAWPSSVVEAESNVTLKCQAHSQNVTFVLRKVNDSGYKQEQSSAENEAEFPFTDLKPKDAGRYFCAYKTTASHEWSESSEHLQLVVTDKHDELEAPSMKTVAHVCNTRTLGR

SEQ ID NO: 14167 - protein, 229 aa, Homo Sapiens
MTAEFLSLLCLGLCLGYEDEKKNEKPPKPSLHAWPSSVVEAESNVTLKCQAHSQNVTFVLRKVNDSGYKQEQSSAENEAEFPFTDLKPKDAGRYFCAYKTTASHEWSESSEHLQLVVTGSLPEPLLSVNVDPGMTPGLRTLRCLTPYNGTECIVIALLKMGIPEPLQVRQVRKNQTDFMLWNVTSNDSGNYSCVYYLSNSSHLASFPSNKLEIWVTDKHDELEAPSMKT

SEQ ID NO: 14168 - protein, 240 aa, Homo Sapiens
MMGIFLVYVGFVFFSVLYVQQGLSSQAKFTEFPRNVTATEGQNVEMSCAFQSGSASVYLEIQWWFLRGPEDLDPGAEGAGAQVELLPDRDPDSDGTKISTVKVQGNDISHKLQISKVRKKDEGLYECRVTDANYGELQEHKAQAYLKVNANSHARRMQAFEASPMWLQDMKPRKNVSAAIPSSIHGSANQRTHSTSSPQVVAKIPKQSPQSAKSKSPVKSTERTAKLTLNSKHHPAPTVL

SEQ ID NO: 14169 - protein, 236 aa, Homo Sapiens
MMGIFLVYVGFVFFSVLYVQQGLSSQAKFTEFPRNVTATEGQNVEMSCAFQSGSASVYLEIQWWFLRGPEDLDPGAEGAGAQVELLPDRDPDSDGTKISTVKVQGNDISHKLQISKVRKKDEGLYECRVTDANYGELQEHKAQAYLKVNANSHARRMQAFEASPMWLQDMKPRKNVSAAIPSSIHGSANQRTHSTSSPQVVAKIPKQSPQSGARIATSHGLSVLLLVCGFVKGALL

SEQ ID NO: 14170 - protein, 244 aa, Homo Sapiens
MMGIFLVYVGFVFFSVLYVQQGLSSQAKFTEFPRNVTATEGQNVEMSCAFQSGSASVYLEIQWWFLRGPEDLDPGAEGAGAQVELLPDRDPDSDGTKISTVKVQGNDISHKLQISKVRKKDEGLYECRVTDANYGELQEHKAQAYLKVNANSHARRMQAFEASPMWLQDMKPRKNVSAAIPSSIHGSANQRTHSTSSPQVVAKIPKQSPQSGMETHFEPFILPLTNAPQKGQSYRVDRFMNGDF

SEQ ID NO: 14171 - protein, 309 aa, Homo Sapiens
MMGIFLVYVGFVFFSVLYVQQGLSSQAKFTEFPRNVTATEGQNVEMSCAFQSGSASVYLEIQWWFLRGPEDLDPGAEGAGAQVELLPDRDPDSDGTKISTVKVQGNDISHKLQISKVRKKDEGLYECRVTDANYGELQEHKAQAYLKVNANSHARRMQAFEASPMWLQDMKPRKNVSAAIPSSIHGSANQRTHSTSSPQVVAKIPKQSPQSVSPILPEVKHLHRPPLLVLPFFSLSSLFSTDPLPTFPTSHRTVKRLPAPLPQPGHGSTPGVQSCVLAPPAKSKSPVKSTERTAKLTLNSKHHPAPTVL

SEQ ID NO: 14172 - protein, 285 aa, Homo Sapiens
MEQRNRLGALGYLPPLLLHALLLFVADAAFTEVPKDVTVREGDDIEMPCAFRASGATSYSLEIQWWYLKEPPRELLHELALSVPGARSKVTNKDATKISTVRVQGNDISHRLRLSAVRLQDEGVYECRVSDYSDDDTQEHKAQAMLRVLSRFAPPNMQAAEAVSHIQSSGPRRHGPASAANANNAGAASRTTSEPGRGDKSPPPGSPPAAIDPAVPEAAAASAAHTPTTTVAAAAAASSASPPSGQAVLLRQRHGSGTGRSYTTDPLLSLLLLALHKFLRLLLGH

SEQ ID NO: 14173 - protein, 204 aa, Homo Sapiens
MGAPLAVALGALHYLALFLQLGGATRPAGHAPWDNHVSGHALFTETPHDMTARTGEDVEMACSFRGSGSPSYSLEIQWWYVRSHRDWTDKQAWASNQLKASQQEDAGKEATKISVVKVVGSNISHKLRLSRVKPTDEGTYECRVIDFSDGKARHHKVKAYLRVQPGENSVLHLPEAPPAAPAPPPPKPGKELRKRSVDQEACSL

SEQ ID NO: 14174 - protein, 149 aa, Homo Sapiens
MGAPLAVALGALHYLALFLQLGGATRPAGHAPWDNHVSGHALFTETPHDMTARTGEDVEMACSFRGSGSPSYSLEIQWWYVRSHRDWTDKQAWASNQVVKVVGSNISHKLRLSRVKPTDEGTYECRVIDFSDGKARHHKVKAYLRVQPG

SEQ ID NO: 14175 - protein, 132 aa, Homo Sapiens
MGAPLAVALGALHYLALFLQLGGATRPAGHAPWDNHVSGHGGQGGGQQHLPQAAPVPGEAHGRRHLRVPRHRLQRRQGPAPQGQGLPAGAARGELRPASARSPSRRARPAAPQARQGAEEALGGPGGLQPLD

SEQ ID NO: 14176 - protein, 191 aa, Homo Sapiens
MRLLALAAAALLARAPAPEVCAALNVTVSPGPVVDYLEGENATLLCHVSQKRRKDSLLAVRWFFAHSFDSQEALMVKMTKLRVVQYYGNFSRSAKRRRLRLLEEQRGALYRLSVLTLQPSDQGHYVCRVQEISRHRNKWTAWSNGSSATEMRGVSSHPVERGAFLGISLVILPHSLPFTADLTMASFLQSS

SEQ ID NO: 14177 - protein, 320 aa, Homo Sapiens
MRLLALAAAALLARAPAPEVCAALNVTVSPGPVVDYLEGENATLLCHVSQKRRKDSLLAVRWFFAHSFDSQEALMVKMTKLRVVQYYGNFSRSAKRRRLRLLEEQRGALYRLSVLTLQPSDQGHYVCRVQEISRHRNKWTAWSNGSSATEMRVISLKASEESSFEKTKETWAFFEDLYVYAVLVCCVGILSILLFMLVIVWQSVFNKRKSRVRHYLVKCPQNSSGETVTSVTSLAPLQPKKGKRQKEKPDIPPAVPAKAPIAPTFHKPKLLKPQRKVTLPKIAEENLTYAELELIKPHRAAKGAPTSTVYAQILFEENKL

SEQ ID NO: 14178 - protein, 118 aa, Homo Sapiens
MAPLRPLLILALLAWVALADQESCKGRCTEGFNVDKKCQCDELCSYYQSCCTDYTAECKPQVTRGDVFTMPEDEYTVYDDGEEKNNATVHEQVGGPSLTSDLQAQSKGNPEQTPVLKP

SEQ ID NO: 14179 - protein, 478 aa, Homo Sapiens
MAPLRPLLILALLAWVALADQESCKGRCTEGFNVDKKCQCDELCSYYQSCCTDYTAECKPQVTRGDVFTMPEDEYTVYDDGEEKNNATVHEQVGGPSLTSDLQAQSKGNPEQTPVLKPEEEAPAPEVGASKPEGIDSRPETLHPGRPQPPAEEELCSGKPFDAFTDLKNGSLFAFRGQYCYELDEKAVRPGYPKLIRDVWGIEGPIDAAFTRINCQGKTYLFKGSQYWRFEDGVLDPDYPRNISDGFDGIPDNVDAALALPAHSYSGRERVYFFKGKQYWEYQFQHQPSQEECEGSSLSAVFEHFAMMQRDSWEDIFELLFWGRTSAGTRQPQFISRDWHGVPGQVDAAMAGRIYISGMAPRPSLAKKQRFRHRNRKGYRSQRGHSRGRNQNSRRPSRATWLSLFSSEESNLGANNYDDYRMDWLVPATCEPIQSVFFFSGDKYYRVNLRTRRVDTVDPPYPRSIAQYWLGCPAPGHL

SEQ ID NO: 14180 - protein, 167 aa, Homo Sapiens
MFLLDSSASVSHYEFSRVREFVGQLVAPLPLGTGALRASLVHVGSRPYTEFPFGQHSSGEAAQDAVRASAQRMGDTHTGLALVYAKEQLFAEASGARPGVPKVLVWVTDGGSSDPVGPPMQELKDLGVTVFIVSTGRGNFLELSAAASAPAEKHLHFVDVDDLHIIV

SEQ ID NO: 14181 - protein, 64 aa, Homo Sapiens
MLPWTALGLALSLRLALARSGAERGAQGPGRHRVHCQHRPRQLPGAVSRCLSPCREAPALCGRG

SEQ ID NO: 14182 - protein, 148 aa, Homo Sapiens
MLPWTALGLALSLRLALARSGAERGPLGEGKHPLKESWGPGGPCLAVGLSGGPTPEAEHSSFPPGPPASAPRGDLMFLLDSSASVSHYEFSRVREFVGQLVAPLPLGTGALRASLVHVGSRPYTEFPFGQHSSGEAAQDAVRASAQRM

SEQ ID NO: 14183 - protein, 445 aa, Homo Sapiens
MLPWTALGLALSLRLALARSGAERGPPASAPRGDLMFLLDSSASVSHYEFSRVREFVGQLVAPLPLGTGALRASLVHVGSRPYTEFPFGQHSSGEAAQDAVRASAQRMGDTHTGLALVYAKEQLFAEASGARPGVPKVLVWVTDGGSSDPVGPPMQELKDLGVTVFIVSTGRGNFLELSAAASAPAEKHLHFVDVDDLHIIVQELRGSILDAMRPQQLHATEITSSGFRLAWPPLLTADSGYYVLELVPSAQPGAARRQQLPGNATDWIWAGLDPDTDYDVALVPESNVRLLRPQILRVRTRPGEAGPGASGPESGAGPAPTQLAALPAPEEAGPERIVISHARPRSLRVSWAPALGSAAALGYHVQFGPLRGGEAQRVEVPAGRNCTTLQGLAPGTAYLVTVTAAFRSGRESALSAKACTPDGPRPRPRPVPRAPTPGTASREP

SEQ ID NO: 14184 - protein, 421 aa, Homo Sapiens
MEAHVFQKDWTATSASARWPLEGRLTVVALKLSLECRVDLLFLLDSSAGTTLDGFLRAKVFVKRFVRAVLSEDSRARVGVATYSRELLVAVPVGEYQDVPDLVWSLDGIPFRGGPTLTGSALRQAAERGFGSATRTGQDRPRRVVVLLTESHSEDEVAGPARHARARELLLLGVGSEAVRAELEEITGSPKHVMVYSDPQDLFNQIPELQGKLCSRQRPGCRTQALDLVFMLDTSASVGPENFAQMQSFVRSCALQFEVNPDVTQVGLVVYGSQVQTAFGLDTKPTRAAMLRAISQAPYLGGVGSAGTALLHIYDKVMTVQRGARPGVPKAVVVLTGGRGAEDAAVPAQKLRNNGISVLVVGVGPVLSEGLRRLAGPRDSLIHVAAYADLRYHQDVLIEWLCGGEWGNPHPQGCPHGRPSA

SEQ ID NO: 14185 - protein, 755 aa, Homo Sapiens
MPPFLLLEAVCVFLFSRVPPSLPLQEVHVSKETIGKISAASKMMWCSAAVDIMFLLDGSNSVGKGSFERSKHFAITVCDGLDISPERVRVGAFQFSSTPHLEFPLDSFSTQQEVKARIKRMVFKGGRTETELALKYLLHRGLPGGRNASVPQILIIVTDGKSQGDVALPSKQLKERGVTVFAVGVRFPRWEELHALASEPRGQHVLLAEQVEDATNGLFSTLSSSAICSSATPDCRVEAHPCEHRTLEMVREFAGNAPCWRGSRRTLAVLAAHCPFYSWKRVFLTHPATCYRTTCPGPCDSQPCQNGGTCVPEGLDGYQCLCPLAFGGEANCALKLSLECRVDLLFLLDSSAGTTLDGFLRAKVFVKRFVRAVLSEDSRARVGVATYSRELLVAVPVGEYQDVPDLVWSLDGIPFRGGPTLTGSALRQAAERGFGSATRTGQDRPRRVVVLLTESHSEDEVAGPARHARARELLLLGVGSEAVRAELEEITGSPKHVMVYSDPQDLFNQIPELQGKLCSRQRPGCRTQALDLVFMLDTSASVGPENFAQMQSFVRSCALQFEVNPDVTQVGLVVYGSQVQTAFGLDTKPTRAAMLRAISQAPYLGGVGSAGTALLHIYDKVMTVQRGARPGVPKAVVVLTGGRGAEDAAVPAQKLRNNGISVLVVGVGPVLSEGLRRLAGPRDSLIHVAAYADLRYHQDVLIEWLCGEAKQPVNLCKPSPCMNEGSCVLQNGSYRCKCRDGWEGPHCENRFLRRP

SEQ ID NO: 14186 - protein, 1024 aa, Homo Sapiens
MLVTGPCLLAGLESPSHALRADAPPHASSAATICVTLAEGHHCDRALEILLHPSEPHQPHLMLEGGSLSSAEYEARVRARRDFQRLQRRDSDGDRQVWFLQRRFHKDILLNPVLALSFCPDLSSKPGHLGTATRELLFLLDSSSVAHKDAIVLAVKSLPPQTLINLAVFGTLVQPLFPESRPCSDDAVQLICESIETLQVPSGPPDVLAALDWAVGQPQHRAYPRQLFLLTAASPMAATTHRTLELMRWHRGTARCFSFGLGPTCHQLLQGLSALSRGQAYFLRPGQRLQPMLVQALRKALEPALSDISVDWFVPDTVEALLTPREIPALYPGDQLLGYCSLFRVDGFRSRPPGGQEPGWQSSGGSVFPSPEEAPSAASPGTEPTGTSEPLGTGTVSAELSSPWAARDSEQTGTDALTDPVTDPGPNPSDTAIWRRIFQSSYIREQYVLTHCSASPEPGPGSTGSSESPGSQGPGSPEGSAPLEPPSQQGCRSLAWGEPAGSRSCPLPAPTPAPFKVGALSTEVLGRQHRAALAGRSLSSPPGRANQVPGRPRKPSLGAILDGPSPEPGQQLGQGLDDSGNLLSPAPMDWDMLMEPPFLFTAVPPSGELAPPAVPPQAPRCHVVIRGLCGEQPMCWEVGVGLETLWGPGDGSQPPSPPVREAAWDQALHRLTAASVVRDNEQLALRGGAETTADRGHARRCWLRALQTSKVSSAPSCFTCPVAVDATTREVLPGALQVCSSEPAEPPGTPPASHSHLDAAPLPTVVYSKGLQRGSPAGAWDSDQNGNSKRALGDPATPTEGPRRPPPRPPCRLSMGRRHKLCSPDPGQANNSEGSDHDYLPLVRLQEAPGSFRLDAPFCAAVRISQERLCRASPFAVHRASLSPTSASLPWALLGPGVGQGDSATASCSPSPSSGSEGPGQVDSGRGSDTEASEGAEGLGGTDLRGRTWATAVALAWLEHRCAAAFDEWELTAAKADCWLRAQHLPDGLDLAALKAAARGLFLLLRHWDQNLQLHLLCYSPANV

SEQ ID NO: 14187 - protein, 1242 aa, Homo Sapiens
MPGLYCPSSWTPLPLTDSWVRACANGPCLSVRARLTYRNPQPQPVDGVFVYPLAEAEVVSGFEAEAAGRRVSFQLQSRRRSQAACCRALGPGLGTPTPRRCAQGHLVLDLAQARSTLVLPTGIIAAAGTMTVTLHSSRELPSRPDGVLHVALPTVLTPLAPPGPPGPPRPPGLCDDSPTSCFGVGSLQEEGLAWEELAAPRDVFSGPARCPAPYTFSFEMLVTGPCLLAGLESPSHALRADAPPHASSAATICVTLAEGHHCDRALEILLHPSEPHQPHLMLEGGSLSSAEYEARVRARRDFQRLQRRDSDGDRQVWFLQRRFHKDILLNPVLALSFCPDLSSKPGHLGTATRELLFLLDSSSVAHKDAIVLAVKSLPPQTLINLAVFGTLVQPLFPESRPCSDDAVQLICESIETLQVPSGPPDVLAALDWAVGQPQHRAYPRQLFLLTAASPMAATTHRTLELMRWHRGTARCFSFGLGPTCHQLLQGLSALSRGQAYFLRPGQRLQPMLVQALRKALEPALSDISVDWFVPDTVEALLTPREIPALYPGDQLLGYCSLFRVDGFRSRPPGGQEPGWQSSGGSVFPSPEEAPSAASPGTEPTGTSEPLGTGTVSAELSSPWAARDSEQSTDALTDPVTDPGPNPSDTAIWRRIFQSSYIREQYVLTHCSASPEPGPGSTGSSESPGSQGPGSPEGSAPLEPPSQQGCRSLAWGEPAGSRSCPLPAPTPAPFKVGALSTEVLGRQHRAALAGRSLSSPPGRANQVPGRPRKPSLGAILDGPSPEPGQQLGQGLDDSGNLLSPAPMDWDMLMEPPFLFTAVPPSGELAPPAVPPQAPRCHVVIRGLCGEQPMCWEVGVGLETLWGPGDGSQPPSPPVREAAWDQALHRLTAASVVRDNEQLALRGGAETTADRGHARRCWLRALQTSKVSSAPSCFTCPVAVDATTREVLPGALQVCSSEPAEPPGTPPASHSHLDAAPLPTVVYSKGLQRGSPAGAWDSDQNGNSKRALGDPATPTEGPRRPPPRPPCRLSMGRRHKLCSPDPGQANNSEGSDHDYLPLVRLQEAPGSFRLDAPFCAAVRISQERLCRASPFAVHRASLSPTSASLPWALLGPGVGQGDSATASCSPSPSSGSEGPGQVDSGRGSDTEASEGAEGLGGTDLRGRTWATAVALAWLEHRCAAAFDEWELTAAKADCWLRAQHLPDGLDLAALKAAARGLFLLLRHWDQNLQLHLLCYSPANV

SEQ ID NO: 14188 - protein, 891 aa, Homo Sapiens
MLPTEVPQSHPGPSALLLLQLLLPPTSAFFPNIWSLLAAPGSITHQDLTEEAALNVTLQLFLEQPPPGRPPLRLEDFLGRTLLADDLFAAYFGPGSSRRFRAALGEVSRANAAQDFLPTSRNDPDLHFDAERLGQGRARLVGALRETVVAARALDHTLARQRLGAALHALQDFYSHSNWVELGEQQPHPHLLWPRQELQNLAQVADPTCSDCEELSCPRNWLGFTLLTSGYFGTHPPKPPGKCSHGGHFDRSSSQPPRGGINKDSTSPGFSPHHMLHLQAAKLALLASIQAFSLLRSRLGDRDFSRLLDITPASSLSFVLDTTGSMGEEINAAKIQARHLVEQRRGSPMEPVHYVLVPFHDPGFGPVFTTSDPDSFWQQLNEIHALGGGDEPEMCLSALQLALLHTPPLSDIFVFTDASPKDAFLTNQVESLTQERRCRVTFLVTEDTSRVQGRARREILSPLRFEPYKAVALASGGEVIFTKDQHIRDVAAIVGESMAALVTLPLDPPVVVPGQPLVFSVDGLLQKITVRIHGDISSFWIKNPAGVSQGQEEGGGPLGHTRRFGQFWMVTMDDPPQTGTWEIQVTAEDTPGVRVQAQTSLDFLFHFGIPMEDGPHPGLYPLTQPVAGLQTQLLVEVTGLGSRANPGDPQPHFSHVILRGVPEGAELGQVPLEPVGPPERGLLAASLSPTLLSTPRPFSLELIGQDAAGRRLHRAAPQPSTVVPVLLELSGPSGFLAPGSKVPLSLRIASFSGPQDLDLRTFVNPSFSLTSNLSRAHLELNESAWGRLWLEVPDSAAPDSVVMVTVTAGGREANPVPPTHAFLRLLVSAPAPQDRHTTPTGSSDPILTTATPAFSPFTLVTQGRAGAGLAAGSPWWGTVGGVLLLLGLASW

SEQ ID NO: 14189 - protein, 325 aa, Homo Sapiens
MPSSTAMAVGALSSSLLVTCCLMVALCSPSIPLEKLAQAPEQPGQEKREHASRDGPGRVNELGRPARDEGGSGRDWKSKSGRGLAGREPWSKLKQAWVSQGGGAKAGDLQVRPRGDTPQAEALAAAAQDAIGPELAPTPEPPEEYVYPDYRGKGCVDESGFVYAIGEKFAPGPSACPCLCTEEGPLCAQPECPRLHPRCIHVDTSQCCPQCKERKNYCEFRGKTYQTLEEFVVSPCERCRCEANGEVLCTVSACPQTECVDPVYEPDQCCPICKNGPNCFAETAVIPAGREVKTDECTICHCTYEEGTWRIERQAMCTRHECRQM

SEQ ID NO: 14190 - protein, 222 aa, Homo Sapiens
MALHIHEACILLLVIPGLVTSAAISHEDYPADEGDQISSNDNLIFDDYRGKGCVDDSGFVYKLGERFFPGHSNCPCVCALDGPVCDQPECPKIHPKCTKVEHNGCCPECKEVKNFCEYHGKNYKILEEFKPSPCEWCRCEPSNEVHCVVADCAVPECVNPVYEPEQCCPVCKNGPNCFAGTTIIPAGIEVKVDECNICHCHNGDWWKPAQCSKRECQGKQTV

SEQ ID NO: 14191 - protein, 139 aa, Homo Sapiens
MALHIHEACILLLVIPGLVTSAAISHEDYPADEGDQISSNDNLIFDDYRGKGCVDDSGFVYKLGERFFPGHSNCPCVCALDGPVCDQPECPKIHPKCTKVEHNGCCPECKEVKNFCEYHGKNYKILEEFKVQTALQERR

SEQ ID NO: 14192 - protein, 670 aa, Homo Sapiens [sequence omitted]

SEQ ID NO: 14193 - protein, 420 aa, Homo Sapiens
MPCPELACPREEWRLGPGQCCFTCQEPTPSTGCSLDDNGVEFPIGQIWSPGDPCELCICQADGSVSCKRTDCVDSCPHPIRIPGQCCPDCSAGCTYTGRIFYNNETFPSVLDPCLSCICLLGSVACSPVDCPITCTYPFHPDGECCPVCRDCNYEGRKVANGQVFTLDDEPCTRCTCQLGEVSCEKVPCQRACADPALLPGDCCSSCPDSLSPLEEKQGLSPHGNVAFSKAGRSLHGDTEAPVNCSSCPGPPTASPSRPVLHLLQLLLRTNLMKTQTLPTSPAGAHGPHSLALGLTATFPGEPGASPRLSPGPSTPPGAPTLPLASPGAPQPPPVTPERSFSASGAQIVSRWPPLPGTLLTEASALSMMDPSPSKTPITLLGPRVLSPTTSRLSTALAATTHPGPQQPPVGASRGEESTM

SEQ ID NO: 14194 - protein, 219 aa, Homo Sapiens
MWAGLLLRAACVALLLPGAPARGYTGRKPPGHFAAERRRLGPHVCLSGFGSGCCPGWAPSMGGGHCTLPLCSFGCGSGICIAPNVCSCQDGEQGATCPETHGPCGEYGCDLTCNHGGCQEVARVCPVGFSMTETAVGIRCTDIDECVTSSCEGHCVNTEGGFVCECGPGMQLSADRHSCQDTDECLGTPCQQRCKNSIGSYKCSCRTGFHLHGNRHSCM

SEQ ID NO: 14195 - protein, 955 aa, Homo Sapiens
MWAGLLLRAACVALLLPGAPARGYTGRKPPGHFAAERRRLGPHVCLSGFGSGCCPGWAPSMGGGHCTLPLCSFGCGSGICIAPNVCSCQDGEQGATCPETHGPCGEYGCDLTCNHGGCQEVARVCPVGFSMTETAVGIRCTDIDECVTSSCEGHCVNTEGGFVCECGPGMQLSADRHSCQDTDECLGTPCQQRCKNSIGSYKCSCRTGFHLHGNRHSCVDVNECRRPLERRVCHHSCHNTVGSFLCTCRPGFRLRADRVSCEAFPKAVLAPSAILQPRQHPSKMLLLLPEAGRPALSPGHSPPSGAPGPPAGVRTTRLPSPTPRLPTSSPSAPVWLLSTLLATPVPTASLLGNLRPPSLLQGEVMGTPSSPRGPESPRLAAGPSPCWHLGAMHESRSRWTEPGCSQCWCEDGKVTCEKVRCEAACSHPIPSRDGGCCPSCTGCFHSGVVRAEGDVFSPPNENCTVCVCLAGNVSCISPECPSGPCQTPPQTDCCTCVPVRCYFHGRWYADGAVFSGGGDECTTCVCQNGEVECSFMPCPELACPREEWRLGPGQCCFTCQEPTPSTGCSLDDNGVEFPIGQIWSPGDPCELCICQADGSVSCKRTDCVDSCPHPIRIPGQCCPDCSAGCTYTGRIFYNNETFPSVLDPCLSCICLLGSVACSPVDCPITCTYPFHPDGECCPVCRDCNYEGRKVANGQVFTLDDEPCTRCTCQLGEVSCEKVPCQRACADPALLPGDCCSSCPDSLSPLEEKQGLSPHGNVAFSKAGRSLHGDTEAPVNCSSCPGPPTASPSRPVLHLLQLLLRTNLMKTQTLPTSPAGAHGPHSLALGLTATFPGEPGASPRLSPGPSTPPGAPTLPLASPGAPQPPPVTPERSFSASGAQIVSRWPPLPGTLLTEASALSMMDPSPSKTPITLLGPRVLSPTTSRLSTALAATTHPGPQQPPVGASRGEESTM

SEQ ID NO: 14196 - protein, 173 aa, Homo Sapiens
MWAGLLLRAACVALLLPGAPARGYTGRKPPGHFAAERRRLGPHVCLSGFGSGCCPGWAPSMGGGHCTLRKCLSLCPKSSPPAVCVASPQSLVRGADGRPQFLVSHLHFSSQPSAPSAVGVASASLPMSAPARMESKGPPAQKPMDHVGSTAVTLPATMEAVRRWPECAPWASR

SEQ ID NO: 14197 - protein, 1590 aa, Homo Sapiens
MPGGACVLVIALMFLAWGEAQECSPGGHQFLRSPYRSVRFDSWHLQQSAVQDLICDHSLSPGWYRFLILDRPAEMPTKCVEMNHCGTQAPIWLSLRDSETLPSPGEIKQLTACATWQFLFSTTKDCCLFQIPVSVRNCGNFSVYLLQPTQGCMGYCAEAISDARLHPCGSDETETGGDCVRQLAASLPPPPAGRPEVLVELIESRLFCRCSFDVPATKNSVGFHIAWSRLSSQEVKEELTQETTVQAFSLLELDGINLRLGDRIFCSASVFFLENPHVQSVAIESQEFFAGFKLQPELSTISEDGKEYYLRIESTVPIICSEFSELDQECKISLKLKTIGQGREHLGLNLALSSCHVDLLQTSSCANGTCSHTFVYYTAVTDFSRDGDRVSNIVVQPIVNEDFLWNNYIPDSIQIKVKDVPTAYCYTFTDPHIITFDGRVYDNFKTGTFVLYKSMSRDFEVHVRQWDCRSLHYPVSCNCGFVAQEGGDIVTFDMCNGQLRESQPYLFIKSQDVTRNIKISESYLGRKVTIWFSSGAFIRADLGEWGMSLTIRAPSVDYRNTLGLCGTFDENPENDFHDKNGMQIDQNFNNYVAFINEWRILPGKSMSDTLPVSMTSPGKPSYCSCSLDTAAYPSSEDLDSVSRSEIALGCKDLNHVSLSSLIPELDVTSEYINSDTLVREINKHTSPEEYNLNLFLQEKKHINLTKLGLNVQKHPGNEKEDSLQYLANKKYTQGRGSHSQEMRYNRQNRWKRQNFHEFPPLFAFPSLSQTDLEELTYFFPEDHAEDVQQEFFPSWPTPSGLTEYSTLTLCQETLANSSIGRLCLAFLGKRLDSVIEMCVKDVLLKDDLSWAEAGVALLENECEKRIVEEGKYNTEEYGTSIEDILSVLKCPNLCSGNGQCMEWGCACSPSFSSYDCSDSYDKAPEITELGNAGFCDVQKYNCMMVRVFGKGFKELPSIKCEVTKLQYNSSEWMPGEPIYTQTVFHNSRAVDCQLPTDVQQFDTMDLVGGKPTGKWQLKVSNDGYKFSNPKITVIYDGACQVCGLYKNDSCTIKENVCIIDGLCYVEGDKNPTSPCLICRPKISRFTWSFLENNQPPVIQALQDKLQTFYGENFEYQFVAFDPEGSDIHFTLDSGPEGASVSSAGLFMWKTDLLTTQQITVRLNDDCDAETRVTIEVTVKSCDCLNGGSCVSDRNFSPGSGVYLCVCLPGFHGSLCEVDISGCQSNPCGLGSYISGFHSYSCDCPPELKVETQFVNQFTTQTVVLTRSDKSVNKEEDDKNAQGRKRHVKPTSGNAFTICKYPCGKSRECVAPNICKCKPGYIGSNCQTALCDPDCKNHGKCIKPNICQCLPGHGGATCDEEHCNPPCQHGGTCLAGNLCTCPYGFVGPRCETMVCNRHCENGGQCLTPDICQCKPGWYGPTCSTALCDPVCLNGGSCNKPNTCLCPNGFFGEHCQNAFCHPPCKNGGHCMRNNVCVCREGYTGRRFQKSICDPTCMNGGKCVGPSTCSCPSGWSGKRCNTPICLQKCKNGGECIAPSICHCPSSWEGVRCQIPICNPKCLYGGRCIFPNVCSCRTEYSGVKCEKKIQIRRH

SEQ ID NO: 14198 - protein, 1302 aa, Homo Sapiens
MPGGACVLVIALMFLAWGEAQECSPGGHQFLRSPYRSVRFDSWHLQQSAVQDLICDHSLSPGWYRFLILDRPAEMPTKCVEMNHCGTQAPIWLSLRDSETLPSPGEIKQLTACATWQFLFSTTKDCCLFQIPVSVRNCGNFSVYLLQPTQGCMGYCAEAISDARLHPCGSDETETGGDCVRQLAASLPPPPAGRPEVLVELIESRLFCRCSFDVPATKNSVGFHIAWSRLSSQEVKEELTQETTVQAFSLLELDGINLRLGDRIFCSASVFFLENPHVQSVAIESQEFFAGFKLQPELSTISEDGKEYYLRIESTVPIICSEFSELDQECKISLKLKTIGQGREHLGLNLALSSCHVDLLQTSSCANGTCSHTFVYYTAVTDFSRDGDRVSNIVVQPIVNEDFLWNNYIPDSIQIKVKDVPTAYCYTFTDPHIITFDGRVYDNFKTGTFVLYKSMSRDFEVHVRQWDCRSLHYPVSCNCGFVAQEGGDIVTFDMCNGQLRESQPYLFIKSQDVTRNIKISESYLGRKVTIWFSSGAFIRADLGEWGMSLTIRAPSVDYRNTLGLCGTFDENPENDFHDKNGMQIDQNFNNYVAFINEWRILPGKSMSDTLPVSMTSPGKPSYCSCSLDTAAYPSSEDLDSVSRSEIALGCKDLNHVSLSSLIPELDVTSEYINSDTLVREINKHTSPEEYNLNLFLQEKKHINLTKLGLNVQKHPGNEKEDSLQYLANKKYTQGRGSHSQEMRYNRQNRWKRQNFHEFPPLFAFPSLSQTDLEELTYFFPEDHAEDVQQEFFPSWPTPSGLTEYSTLTLCQETLANSSIGRLCLAFLGKRLDSVIEMCVKDVLLKDDLSWAEAGVALLENECEKRIVEEGKYNTEEYGTSIEDILSVLKCPNLCSGNGQCMEWGCACSPSFSSYDCSDSYDKAPEITELGNAGFCDVQKYNCMMVRVFGKGFKELPSIKCEVTKLQYNSSEWMPGEPIYTQTVFHNSRAVDCQLPTDVQQFDTMDLVGGKPTGKWQLKVSNDGYKFSNPKITVIYDGACQVCGLYKNDSCTIKENVCIIDGLCYVEGDKNPTSPCLICRPKISRFTWSFLENNQPPVIQALQDKLQTFYGENFEYQFVAFDPEGSDIHFTLDSGPEGASVSSAGLFMWKTDLLTTQQITVRLNDDCDAETRVTIEVTVKSCDCLNGGSCVSDRNFSPGSGVYLCVCLPGFHGSLCEVDISGCQSNPCGLGSYISGFHSYSCDCPPELKGKNCQEDVDECDSKPCFEGVACLNTFGSYHCGSCPEGFYGDGKICHGKSFYFLL

SEQ ID NO: 14199 - protein, 352 aa, Homo Sapiens
MPGGACVLVIALMFLAWGEAQECSPGGHQFLRSPYRSVRFDSWHLQQSAVQDLICDHSLSPGWYRFLILDRPAEMPTKCVEMNHCGTQAPIWLSLRDSETLPSPGEIKQLTACATWQFLFSTTKDCCLFQIPVSVRNCGNFSVYLLQPTQGCMGYCAEAISDARLHPCGSDETETGGDCVRQLAASLPPPPAGRPEVLVELIESRLFCRCSFDVPATKNSVGFHIAWSRLSSQEVKEELTQETTVQAFSLLELDGINLRLGDRIFCSASVFFLENPHVQSVAIESQEFFAGFKLQPELSTISEDGKEYYLRIESTVPIICSEFSELDQECKISLKLKTIGQDLVFFWGIYPC

SEQ ID NO: 14200 - protein, 170 aa, Homo Sapiens
MPGGACVLVIALMFLAWGEAQECSPGGHQFLRSPYRSVRFDSWHLQQSAVQDLICDHSLSPGWYRFLILDRPAEMPTKCVEMNHCGTQAPIWLSLRDSETLPSPGEIKQLTACATWQFLFSTTKDCCLFQIPVSVRNCGNFSVYLLQPTQGCMGYCAEGFFAKIVKSPHT

SEQ ID NO: 14201 - protein, 944 aa, Homo Sapiens
MSLTIRAPSVDYRNTLGLCGTFDENPENDFHDKNGMQIDQNFNNYVAFINEWRILPGKSMSDTLPVSMTSPGKPSYCSCSLDTAAYPSSEDLDSVSRSEIALGCKDLNHVSLSSLIPELDVTSEYINSDTLVREINKHTSPEEYNLNLFLQEKKHINLTKLGLNVQKHPGNEKEDSLQYLANKKYTQGRGSHSQEMRYNRQNRWKRQNFHEFPPLFAFPSLSQTDLEELTYFFPEDHAEDVQQEFFPSWPTPSGLTEYSTLTLCQETLANSSIGRLCLAFLGKRLDSVIEMCVKDVLLKDDLSWAEAGVALLENECEKRIVEEGKYNTEEYGTSIEDILSVLKCPNLCSGNGQCMEWGCACSPSFSSYDCSDSYDKAPEITELGNAGFCDVQKYNCMMVRVFGKGFKELPSIKCEVTKLQYNSSEWMPGEPIYTQTVFHNSRAVDCQLPTDVQQFDTMDLVGGKPTGKWQLKVSNDGYKFSNPKITVIYDGACQVCGLYKNDSCTIKENVCIIDGLCYVEGDKNPTSPCLICRPKISRFTWSFLENNQPPVIQALQDKLQTFYGENFEYQFVAFDPEGSDIHFTLDSGPEGASVSSAGLFMWKTDLLTTQQITVRLNDDCDAETRVTIEVTVKSCDCLNGGSCVSDRNFSPGSGVYLCVCLPGFHGSLCEVDISGCQSNPCGLGSYISGFHSYSCDCPPELKVETQFVNQFTTQTVVLTRSDKSVNKEEDDKNAQGRKRHVKPTSGNAFTICKYPCGKSRECVAPNICKCKPGYIGSNCQTALCDPDCKNHGKCIKPNICQCLPGHGGATCDEEHCNPPCQHGGTCLAGNLCTCPYGFVGPRCETMVCNRHCENGGQCLTPDICQCKPGWYGPTCSTALCDPVCLNGGSCNKPNTCLCPNGFFGEHCQNAFCHPPCKNGGHCMRNNVCVCREGYTGRRFQKRHL

SEQ ID NO: 14202 - protein, 166 aa, Homo Sapiens
VTVKSCDCLNGGSCVSDRNFSPGSGVYLCVCLPGFHGSLCEVDISGCQSNPCGLGSYISGFHSYSCDCPPELKGKNCQEDVDECDSKPCFEGVACLNTFGSYHCGSCPEGFYGDGKICHVETQFVNQFTTQTVVLTRSDKSVNKEEDDKNAQGRKRHVKPTSGNAF

SEQ ID NO: 14203 - protein, 60 aa, Homo Sapiens
MIPARFAGVLLALALILPETRCLQMPSPVGELRSIKVAQNCPILWGHRMRRKESKTWMDY

SEQ ID NO: 14204 - protein, 60 aa, Homo Sapiens; identical to SEQ ID NO: 14203

SEQ ID NO: 14205 - protein, 2813 aa, Homo Sapiens
MIPARFAGVLLALALILPGTLCAEGTRGRSSTARCSLFGSDFVNTFDGSMYSFAGYCSYLLAGGCQKRSFSIIGDFQNGKRVSLSVYLGEFFDIHLFVNGTVTQGDQRVSMPYASKGLYLETEAGYYKLSGEAYGFVARIDGSGNFQVLLSDRYFNKTCGLCGNFNIFAEDDFMTQEGTLTSDPYDFANSWALSSGEQWCERASPPSSSCNISSGEMQKGLWEQCQLLKSTSVFARCHPLVDPEPFVALCEKTLCECAGGLECACPALLEYARTCAQEGMVLYGWTDHSACSPVCPAGMEYRQCVSPCARTCQSLHINEMCQERCVDGCSCPEGQLLDEGLCVESTECPCVHSGKRYPPGTSLSRDCNTCICRNSQWICSNEECPGECLVTGQSHFKSFDNRYFTFSGICQYLLARDCQDHSFSIVIETVQCADDRDAVCTRSVTVRLPGLHNSLVKLKHGAGVAMDGQDVQLPLLKGDLRIQHTVTASVRLSYGEDLQMDWDGRGRLLVKLSPVYAGKTCGLCGNYNGNQGDDFLTPSGLAEPRVEDFGNAWKLHGDCQDLQKQHSDPCALNPRMTRFSEEACAVLTSPTFEACHRAVSPLPYLRNCRYDVCSCSDGRECLCGALASYAAACAGRGVRVAWREPGRCELNCPKGQVYLQCGTPCNLTCRSLSYPDEECNEACLEGCFCPPGLYMDERGDCVPKAQCPCYYDGEIFQPEDIFSDHHTMCYCEDGFMHCTMSGVPGSLLPDAVLSSPLSHRSKRSLSCRPPMVKLVCPADNLRAEGLECTKTCQNYDLECMSMGCVSGCLCPPGMVRHENRCVALERCPCFHQGKEYAPGETVKIGCNTCVCQDRKWNCTDHVCDATCSTIGMAHYLTFDGLKYLFPGECQYVLVQDYCGSNPGTFRILVGNKGCSHPSVKCKKRVTILVEGGEIELFDGEVNVKRPMKDETHFEVVESGRYIILLLGKALSVVWDRHLSISVVLKQTYQEKVCGLCGNFDGIQNNDLTSSNLQVEEDPVDFGNSWKVSSQCADTRKVPLDSSPATCHNNIMKQTMVDSSCRILTSDVFQDCNKLVDPEPYLDVCIYDTCSCESIGDCACFCDTIAAYAHVCAQHGKVVTWRTATLCPQSCEERNLRENGYECEWRYNSCAPACQVTCQHPEPLACPVQCVEGCHAHCPPGKILDELLQTCVDPEDCPVCEVAGRRFASGKKVTLNPSDPEHCQICHCDVVNLTCEACQEPGGLVVPPTDAPVSPTTLYVEDISEPPLHDFYCSRLLDLVFLLDGSSRLSEAEFEVLKAFVVDMMERLRISQKWVRVAVVEYHDGSHAYIGLKDRKRPSELRRIASQVKYAGSQVASTSEVLKYTLFQIFSKIDRPEASRITLLLMASQEPQRMSRNFVRYVQGLKKKKVIVIPVGIGPHANLKQIRLIEKQAPENKAFVLSSVDELEQQRDEIVSYLCDLAPEAPPPTLPPDMAQVTVGPGLLGVSTLGPKRNSMVLDVAFVLEGSDKIGEADFNRSKEFMEEVIQRMDVGQDSIHVTVLQYSYMVTVEYPFSEAQSKGDILQRVREIRYQGGNRTNTGLALRYLSDHSFLVSQGDREQAPNLVYMVTGNPASDEIKRLPGDIQVVPIGVGPNANVQELERIGWPNAPILIQDFETLPREAPDLVLQRCCSGEGLQIPTLSPAPDCSQPLDVILLLDGSSSFPASYFDEMKSFAKAFISKANIGPRLTQVSVLQYGSITTIDVPWNVVPEKAHLLSLVDVMQREGGPSQIGDALGFAVRYLTSEMHGARPGASKAVVILVTDVSVDSVDAAADAARSNRVTVFPIGIGDRYDAAQLRILAGPAGDSNVVKLQRIEDLPTMVTLGNSFLHKLCSGFVRICMDEDGNEKRPGDVWTLPDQCHTVTCQPDGQTLLKSHRVNCDRGLRPSCPNSQSPVKVEETCGCRWTCPCVCTGSSTRHIVTFDGQNFKLTGSCSYVLFQNKEQDLEVILHNGACSPGARQGCMKSIEVKHSALSVELHSDMEVTVNGRLVSVPYVGGNMEVNVYGAIMHEVRFNHLGHIFTFTPQNNEFQLQLSPKTFASKTYGLCGICDENGANDFMLRDGTVTTDWKTLVQEWTVQRPGQTCQPILEEQCLVPDSSHCQVLLLPLFAECHKVLAPATFYAICQQDSCHQEQVCEVIASYAHLCRTNGVCVDWRTPDFCAMSCPPSLVYNHCEHGCPRHCDGNVSSCGDHPSEGCFCPPDKVMLEGSCVPEEACTQCIGEDGVQHQFLEAWVPDHQPCQICTCLSGRKVNCTTQPCPTAKAPTCGLCEVARLRQNADQCCPEYECVCDPVSCDLPPVPHCERGLQPTLTNPGECRPNFTCACRKEECKRVSPPSCPPHRLPTLRKTQCCDEYECACNCVNSTVSCPLGYLASTATNDCGCTTTTCLPDKVCVHRSTIYPVGQFWEEGCDVCTCTDMEDAVMGLRVAQCSQKPCEDSCRSGFTYVLHEGECCGRCLPSACEVVTGSPRGDSQSSWKSVGSQWASPENPCLINECVRVKEEVFIQQRNVSCPQLEVPVCPSGFQLSCKTSACCPSCRCERMEACMLNGTVIGPGKTVMIDVCTTCRCMVQVGVISGFKLECRKTTCNPCPLGYKEENNTGECCGRCLPTACTIQLRGGQIMTLKRDETLQDGCDTHFCKVNERGEYFWEKRVTGCPPFDEHKCLAEGGKIMKIPGTCCDTCEEPECNDITARLQYVKVGSCKSEVEVDIHYCQGKCASKAMYSIDINDVQDQCSCCSPTRTEPMQVALHCTNGSVVYHEVLNAMECKCSPRKCSK

SEQ ID NO: 14206 - protein, 287 aa, Homo Sapiens
MPALCLVLCWFQGLLGEVWNAVDSGHCLQTYSLHTEAVRAARWAPCGRRILSGGFDFALHLTDLETGTQLFSGRSDFRITTLKFHPKDHNIFLCGGFSSEMKAWDIRTGKVMRSYKATIQQTLDILFLREGSEFLSSTDASTRDSADRTIIAWDFRTSAKISNQIFHERFTCPSLALHPREPVFLAQTNGNYLALFSTVWPYRMSRRRRYEGHKVEGYSVGCECSPGGDLLVTGSADGRVLMYSFRTASRACTLQGHTQACVGTTYHPVLPSVLATCSWGGDMKIWH

SEQ ID NO: 14207 - protein, 544 aa, Homo Sapiens
MTARTLSLMASLVAYDDSDSEAETEHAGSFNATGQQKDTSGVARPPGQDFASGTLDVPKAGAQPTKHGSCEDPGGYRLPLAQLGRSDWGSCPSQRLQWPGKEPQVTFPIKEPSCSSLWTSHVPASHMPLAAARFKQVKLSRNFPKSSFHAQSESETVGKNGSSFQKKKCEDCVVPYTPRRLRQRQALSTETGKGKDVEPQGPPAGRAPAPLYVGPGVSEFIQPYLNSHYKETTVPRKVLFHLRGHRGPVNTIQWCPVLSKSHMLLSTSMDKTFKVWNAVDSGHCLQTYSLHTEAVRAARWAPCGRRILSGGFDFALHLTDLETGTQLFSGRSDFRITTLKFHPKDHNIFLCGGFSSEMKAWDIRTGKVMRSYKATIQQTLDILFLREGSEFLSSTDASTRDSADRTIIAWDFRTSAKISNQIFHERFTCPSLALHPREPVFLAQTNGNYLALFSTVWPYRMSRRRRYEGHKVEGYSVGCECSPGGDLLVTGSADGRVLMYSFRTASRACTLQGHTQACVGTTYHPVLPSVLATCSWGGDMKIWH

SEQ ID NO: 14208 - protein, 544 aa, Homo Sapiens; identical to SEQ ID NO: 14207

SEQ ID NO: 14209 - protein, 274 aa, Homo Sapiens
MTARTLSLMASLVAYDDSDSEAETEHAGSFNATGQQKDTSGVARPPGQDFASGTLDVPKAGAQPTKHGSCEDPGGYRLPLAQLGRSDWGSCPSQRLQWPGKEPQVTFPIKEPSCSSLWTSHVPASHMPLAAARFKQVKLSRNFPKSSFHAQSESETVGKNGSSFQKKKCEDCVVPYTPRRLRQRQALSTETGKGKDVEPQGPPAGRAPAPLYVGPGVSEFIQPYLNSHYKETTVPRKVLFHLRGHRGPVNTIQWCPVLSKSHMLLSTSMDKTFK

SEQ ID NO: 14210 - protein, 289 aa, Homo Sapiens
MTARTLSLMASLVAYDDSDSEAETEHAGSFNATGQQKDTSGVARPPGQDFASGTLDVPKAGAQPTKHGSCEDPGGYRLPLAQLGRSDWGSCPSQRLQWPGKEPQVTFPIKEPSCSSLWTSHVPASHMPLAAARFKQVKLSRNFPKSSFHAQSESETVGKNGSSFQKKKCEDCVVPYTPRRLRQRQALSTETGKGKDVEPQGPPAGRAPAPLYVGPGVSEFIQPYLNSHYKETTVPRKVLFHLRGHRGPVNTIQWCPVLSKSHMLLSTSMDKTFKEPSYLVVEVTLESLP

SEQ ID NO: 14211 - protein, 544 aa, Homo Sapiens; identical to SEQ ID NO: 14207

SEQ ID NO: 14212 - protein, 121 aa, Homo Sapiens
  misc_feature (1)..(1): Xaa can be any naturally occurring amino acid
XSTDASTRDSADRTIIAWDFRTSAKISNQIFHERFTCPSLALHPREPVFLAQTNGNYLALFSTVWPYRMSRRRRYEGHKVLLSLSPRRMLSPSPKPPGSPGHGPWGAWSLCLGGSCFLFPG

SEQ ID NO: 14213 - protein, 1941 aa, Homo Sapiens
MAQGSGGREGALRTPAGGWHSPPSPDMQELLRSVERDLSIDPRQLAPAPGGTHVVALVPARWLASLRDRRLPLGPCPRAEGLGEAEVRTLLQRSVQRLPAGWTRVEVHGLRKRRLSYPLGGGLPFEDGSCGPETLTRFMQEVAAQNYRNLWRHAYHTYGQPYSHSPAPSAVPALDSVRQALQRVYGCSFLPVGETTQCPSYAREGPCPPRGSPACPSLLRAEALLESPEMLYVVHPYVQFSLHDVVTFSPAKLTNSQAKVLFILFRVLRAMDACHRQGLACGALSLYHIAVDEKLCSELRLDLSAYERPEEDENEEAPVARDEAGIVSQEEQGGQPGQPTGQEELRSLVLDWVHGRISNFHYLMQLNRLAGRRQGDPNYHPVLPWVVDFTTPHGRFRDLRKSKFRLNKGDKQLDFTYEMTRQAFVAGGAGGGEPPHVPHHISDVLSDITYYVYKARRTPRSVLCGHVRAQWEPHEYPASMERMQNWTPDECIPEFYTDPSIFRSIHPDMPDLDVPAWCSSSQEFVAAHRALLESREVSRDLHHWIDLTFGYKLQGKEAVKEKNVCLHLVDAHTHLASYGVVQLFDQPHPQRLAGAPALAPEPPLIPKLLVQTIQETTGREDFTENPGQLPNGVGRPVLEATPCEASWTRDRPVAGEDDLEQATEALDSISLAGKAGDQLGSSSQASPGLLSFSVASASRPGRRNKAAGADPGEGEEGRILLPEGFNPMQALEELEKTGNFLAKGLGGLLEVPEQPRVQPAVPLQCLLHRDMQALGVLLAEMVFATRVRTLQPDAPLWVRFQAVRGLCTRHPKEVPVSLQPVLDTLLQMSGPEVPMGAERGKLDQLFEYRPVSQGLPPPCPSQLLSPFSSVVPFPPYFPALHRFILLYQARRVEDEAQGRELVFALWQQLGAVLKDITPEGLEILLPFVLSLMSEEHTAVYTAWYLFEPVAKALGPKNANKYLLKPLIGAYESPCQLHGRFYLYTDCFVAQLMVRLGLQAFLTHLLPHVLQVLAGAEASQEESKDLAGAAEEEESGLPGAGPGSCAFGEEIPMDGEPPASSGLGLPDYTSGVSFHDQADLPETEDFQAGLYVTESPQPQEAEAVSLGRLSDKSSTSETSLGEERAPDEGGAPVDKSSLRSGDSSQDLKQSEGSEEEEEEEDSCVVLEEEEGEQEEVTGASELTLSDTVLSMETVVAGGSGGDGEEEEEALPEQSEGKEQKILLDTACKMVRWLSAKLGPTVASRHVARNLLRLLTSCYVGPTRQQFTVSSGESPPLSAGNIYQKRPVLGDIVSGPVLSCLLHIARLYGEPVLTYQYLPYISYLVAPGSASGPSRLNSRKEAGLLAAVTLTQKIIVYLSDTTLMDILPRISHEVLLPVLSFLTSLVTGFPSGAQARTILCVKTISLIALICLRIGQEMVQQHLSEPVATFFQVFSQLHELRQQDLKLDPAGRGEGQLPQVVFSDGQQRPVDPALLDELQKVFTLEMAYTIYVPFSCLLGDIIRKIIPNHELVGELAALYLESISPSSRNPASVEPTMPGTGPEWDPHGGGCPQDDGHSGTFGSVLVGNRIQIPNDSRPENPGPLGPISGVGGGGLGSGSDDNALKQELPRSVHGLSGNWLAYWQYEIGVSQQDAHFHFHQIRLQSFPGHSGAVKCVAPLSSEDFFLSGSKDRTVRLWPLYNYGDGTSETAPRLVYTQHRKSVFFVGQLEAPQHVVSCDGAVHVWDPFTGKTLRTVEPLDSRVPLTAVAVMPAPHTSITMASSDSTLRFVDCRKPGLQHEFRLGGGLNPGLVRALAISPSGRSVVAGFSSGFMVLLDTRTGLVLRGWPAHEGDILQIKAVEGSVLVSSSSDHSLTVWKELEQKPTHHYKSASDPIHTFDLYGSEVVTGTVSNKIGVCSLLEPPSQATTKLSSENFRGTLTSLALLPTKRHLLLGSDNGVIRLLA

SEQ ID NO: 14214 - protein, 890 aa, Homo Sapiens
MDGEPPASSGLGLPDYTSGVSFHDQADLPETEDFQAGLYVTESPQPQEAEAVSLGRLSDKSSTSETSLGEERAPDEGGAPVDKSSLRSGDSSQDLKQSEGSEEEEEEEDSCVVLEEEEGEQEEVTGASELTLSDTVLSMETVVAGGSGGDGEEEEEALPEQSEGKEQKILLDTACKMVRWLSAKLGPTVASRHVARNLLRLLTSCYVGPTRQQFTVSSGESPPLSAGNIYQKRPVLGDIVSGPVLSCLLHIARLYGEPVLTYQYLPYISYLVAPGSASGPSRLNSRKEAGLLAAVTLTQKIIVYLSDTTLMDILPRISHEVLLPVLSFLTSLVTGFPSGAQARTILCVKTISLIALICLRIGQEMVQQHLSEPVATFFQVFSQLHELRQQDLKLDPAGRGEGQLPQVVFSDGQQRPVDPALLDELQKVFTLEMAYTIYVPFSCLLGDIIRKIIPNHELVGELAALYLESISPSSRNPASVEPTMPGTGPEWDPHGGGCPQDDGHSGTFGSVLVGNRIQIPNDSRPENPGPLGPISGVGGGGLGSGSDDNALKQELPRSVHGLSGNWLAYWQYEIGVSQQDAHFHFHQIRLQSFPGHSGAVKCVAPLSSEDFFLSGSKDRTVRLWPLYNYGDGTSETAPRLVYTQHRKSVFFVGQLEAPQHVVSCDGAVHVWDPFTGKTLRTVEPLDSRVPLTAVAVMPAPHTSITMASSDSTLRFVDCRKPGLQHEFRLGGGLNPGLVRALAISPSGRSVVAGFSSGFMVLLDTRTGLVLRGWPAHEGDILQIKAVEGSVLVSSSSDHSLTVWKELEQKPTHHYKSASDPIHTFDLYGSEVVTGTVSNKIGVCSLLEPPSQATTKLSSENFRGTLTSLALLPTKRHLLLGSDNGVIRLLA

SEQ ID NO: 14215 - protein, 580 aa, Homo Sapiens
MDILPRISHEVLLPVLSFLTSLVTGFPSGAQARTILCVKTISLIALICLRIGQEMVQQHLSEPVATFFQVFSQLHELRQQDLKLDPAGRGEGQLPQVVFSDGQQRPVDPALLDELQKVFTLEMAYTIYVPFSCLLGDIIRKIIPNHELVGELAALYLESISPSSRNPASVEPTMPGTGPEWDPHGGGCPQDDGHSGTFGSVLVGNRIQIPNDSRPENPGPLGPISGVGGGGLGSGSDDNALKQELPRSVHGLSGNWLAYWQYEIGVSQQDAHFHFHQIRLQSFPGHSGAVKCVAPLSSEDFFLSGSKDRTVRLWPLYNYGDGTSETAPRLVYTQHRKSVFFVGQLEAPQHVVSCDGAVHVWDPFTGKTLRTVEPLDSRVPLTAVAVMPAPHTSITMASSDSTLRFVDCRKPGLQHEFRLGGGLNPGLVRALAISPSGRSVVAGFSSGFMVLLDTRTGLVLRGWPAHEGDILQIKAVEGSVLVSSSSDHSLTVWKELEQKPTHHYKSASDPIHTFDLYGSEVVTGTVSNKIGVCSLLEPPSQATTKLSSENFRGTLTSLALLPTKRHLLLGSDNGVIRLLA

SEQ ID NO: 14216 - protein, 171 aa, Homo Sapiens
MHAGPCSSQPDTVVPRTQRALFPSGAQARTILCVKTISLIALICLRIGQEMVQQHLSEPVATFFQVFSQLHELRQQDLKLDPAGRGEGQLPQVVFSDGQQRPVDPALLDELQKVFTLEMAYTIYVPFSCLLGDIIRKIIPNHELVGELAALYLESISPSSRNPASVEPTMP

SEQ ID NO: 14217 - protein, 172 aa, Homo Sapiens
MLVRVVLSLTPSFPEPSALYTACKMVRWLSAKLGPTVASRHVARNLLRLLTSCYVGPTRQQFTVSSGESPPLSAGNIYQKRPVLGDIVSGPVLSCLLHIARLYGEPVLTYQYLPYISYLVAPGSASGPSRLNSRKEAGLLAAVTLTQKIIVYLSDTTLMDILPRISHEVLLP

SEQ ID NO: 14218 - protein, 738 aa, Homo Sapiens
MLVRVVLSLTPSFPEPSALYTACKMVRWLSAKLGPTVASRHVARNLLRLLTSCYVGPTRQQFTVSSGESPPLSAGNIYQKRPVLGDIVSGPVLSCLLHIARLYGEPVLTYQYLPYISYLVAPGSASGPSRLNSRKEAGLLAAVTLTQKIIVYLSDTTLMDILPRISHEVLLPVLSFLTSLVTGFPSGAQARTILCVKTISLIALICLRIGQEMVQQHLSEPVATFFQVFSQLHELRQQDLKLDPAGRGEGQLPQVVFSDGQQRPVDPALLDELQKVFTLEMAYTIYVPFSCLLGDIIRKIIPNHELVGELAALYLESISPSSRNPASVEPTMPGTGPEWDPHGGGCPQDDGHSGTFGSVLVGNRIQIPNDSRPENPGPLGPISGVGGGGLGSGSDDNALKQELPRSVHGLSGNWLAYWQYEIGVSQQDAHFHFHQIRLQSFPGHSGAVKCVAPLSSEDFFLSGSKDRTVRLWPLYNYGDGTSETAPRLVYTQHRKSVFFVGQLEAPQHVVSCDGAVHVWDPFTGKTLRTVEPLDSRVPLTAVAVMPAPHTSITMASSDSTLRFVDCRKPGLQHEFRLGGGLNPGLVRALAISPSGRSVVAGFSSGFMVLLDTRTGLVLRGWPAHEGDILQIKAVEGSVLVSSSSDHSLTVWKELEQKPTHHYKSASDPIHTFDLYGSEVVTGTVSNKIGVCSLLEPPSQATTKLSSENFRGTLTSLALLPTKRHLLLGSDNGVIRLLA

SEQ ID NO: 14219 - protein, 132 aa, Homo Sapiens
MVQQHLSEPVATFFQVFSQLHELRQQDLKLDPAGRGEGQLPQVVFSDGQQRPVDPALLDELQKVFTLEMAYTIYVPFSCLLGDIIRKIIPNHELVGELAALYLESISPSSRNPASVEPTMPGTGPEWDPHGG

SEQ ID NO: 14220 - protein, 714 aa, Homo Sapiens
MVRWLSAKLGPTVASRHVARNLLRLLTSCYVGPTRQQFTVSSGESPPLSAGNIYQKRPVLGDIVSGPVLSCLLHIARLYGEPVLTYQYLPYISYLVAPGSASGPSRLNSRKEAGLLAAVTLTQKIIVYLSDTTLMDILPRISHEVLLPVLSFLTSLVTGFPSGAQARTILCVKTISLIALICLRIGQEMVQQHLSEPVATFFQVFSQLHELRQQDLKLDPAGRGEGQLPQVVFSDGQQRPVDPALLDELQKVFTLEMAYTIYVPFSCLLGDIIRKIIPNHELVGELAALYLESISPSSRNPASVEPTMPGTGPEWDPHGGGCPQDDGHSGTFGSVLVGNRIQIPNDSRPENPGPLGPISGVGGGGLGSGSDDNALKQELPRSVHGLSGNWLAYWQYEIGVSQQDAHFHFHQIRLQSFPGHSGAVKCVAPLSSEDFFLSGSKDRTVRLWPLYNYGDGTSETAPRLVYTQHRKSVFFVGQLEAPQHVVSCDGAVHVWDPFTGKTLRTVEPLDSRVPLTAVAVMPAPHTSITMASSDSTLRFVDCRKPGLQHEFRLGGGLNPGLVRALAISPSGRSVVAGFSSGFMVLLDTRTGLVLRGWPAHEGDILQIKAVEGSVLVSSSSDHSLTVWKELEQKPTHHYKSASDPIHTFDLYGSEVVTGTVSNKIGVCSLLEPPSQATTKLSSENFRGTLTSLALLPTKRHLLLGSDNGVIRLLA

SEQ ID NO: 14221 - protein, 197 aa, Homo Sapiens
  misc_feature (1)..(1): Xaa can be any naturally occurring amino acid
XFQAGLYVTESPQPQEAEAVSLGRLSDKSSTSETSLGEERAPDEGGAPVDKSSLRSGDSSQDLKQSEGSEEEEEEEDSCVVLEEEEGEQEEVTGASELTLSDTVLSMETVVAGGSGGDGEEEEEALPEQSEGKEQKILLGPTRQQFTVSSGESPPLSAGNIYQKRPVLGDIVSGPVLSCLLHIARLYGEPVLTYQYL

SEQ ID NO: 14222 - protein, 123 aa, Homo Sapiens
  misc_feature (1)..(1): Xaa can be any naturally occurring amino acid
XRLLTSCYVGPTRQQFTVSSGESPPLSAGNIYQKRPVLGDIVSGPVLSCLLHIARLYGEPVLTYQYLPYISYLVPKWGPGSDHPVCENHQPHRPHLPAHWTGDGPAAPERARGHLFPGLLSAA

SEQ ID NO: 14223 - protein, 475 aa, Homo Sapiens
ARSHTAPVLALAMEQRRGQLATVSQDRTVRIWDLATLQQLYDFTSSEDAPCAVTFHPTRPTFFCGFSSGAVRSFSLEAAEVLVEHTCHRGAVTGLTATPDGRLLFSSCSQGSLAQYSCADPQWHVLRVAADMVCPDAPASPSALAVSRDGRLLAFVGPSRCTVTVMGSASLDELLRVDIGTLDLASSRLDSAMAVCFGPAALGHLLVSTSSNRVVVLDAVSGRIIRELPGVHPEPCPSLTLSEDARFLLIAAGRTIKVWDYATQASPGPQVYIGHSEPVQAVAFSPDQQQVLSAGDAVFLWDVLAPTESDQSFPGAPPACKTGPGAGPLEDAASRASELPRQQVPKPCQASPPRLGVCARPPEGGDGHLPASRQRWVAASEGCRRLQREWAGQHGLEAGHRLLCLHVRPPGGGGGPALWRPAALVRPLCGDLHAGPQPQCPGPGLCLGPKQHDRPLSDPRLGRVWRPLPASHFPP

SEQ ID NO: 14224 - protein, 115 aa, Homo Sapiens
EKIPLPFFAMSLSLSPGTHLLAVGFAGLHRPPGCSSRPPATRSLCGRSPASEMQQGLWWWASRLVMPGTWTQAWQRRQVVNGLMLGQARIHVNRLEQAVVNLAPCEYFHTCCPFA

SEQ ID NO: 14225 - protein, 1748 aa, Homo Sapiens
MARAWQHPFLNVFRHFRVDEWKRSAKQGDVAVVTDKTLKGAVYRIRGSVSAANYIQLPKSSTQSLGLTGRYLYVLFRPLPSKHFVIHLDVSSKDNQVIRVSFSNLFKEFKSTATWLQFPLVLEARTPQRDLVGLAPSGARWTCLQLDLQDVLLVYLNRCYGHLKSIRLCASLLVRNLYTSDLCFEPAISGAQWAKLPVTPMPREMAFPVPKGESWHDRYIHVRFPSESLKVPSKPIEKSCSPPEAVLLGPGPQPLPCPVASSKPVRFSVSPVVQTPSPTASGRAALAPRPFPEVSLSQERSDASNADGPGFHSLEPWAQLEASDIHTAAAGTHVLTHESAEVPVARTGSCEGFLPDPVLRLKGVIGFGGHGTRQALWTPDGAAVVYPCHAVIVVLLVDTGEQRFFLGHTDKVSALALDGSSSLLASAQARAPSVMRLWDFQTGRCLCLFRSPMHVVCSLSFSDSGALLCGVGKDHHGRTMVVAWGTGQVGLGGEVVVLAKAHTDFDVQAFRVTFFDETRMASCGQGSVRLWRLRGGVLRSCPVDLGEHHALQFTDLAFKQARDGCPEPSAAMLFVCSRSGHILEIDCQRMVVRHARRLLPTRTPGGPHPQKQTFSSGPGIAISSLSVSPAMCAVGSEDGFLRLWPLDFSSVLLEAEHEGPVSSVCVSPDGLRVLSATSSGHLGFLDTLSRVYHMLARSHTAPVLALAMEQRRGQLATVSQDRTVRIWDLATLQQLYDFTSSEDAPCAVTFHPTRPTFFCGFSSGAVRSFSLEAAEVLVEHTCHRGAVTGLTATPDGRLLFSSCSQGSLAQYSCADPQWHVLRVAADMVCPDAPASPSALAVSRDGRLLAFVGPSRCTVTVMGSASLDELLRVDIGTLDLASSRLDSAMAVCFGPAALGHLLVSTSSNRVVVLDAVSGRIIRELPGVHPEPCPSLTLSEDARFLLIAAGRTIKVWDYATQASPGPQVYIGHSEPVQAVAFSPDQQQVLSAGDAVFLWDVLAPTESDQSFPGAPPACKTGPGAGPLEDAASRASELPRQQVPKPCQASPPRLGVCARPPEGGDGARDTRNSGAPRTTYLASCKAFTPARVSCSPHSAKGTCPPPASGGWLRLKAVVGYSGNGRANMVWRPDTGFFAYTCGRLVVVEDLHSGAQQHWSGHSAEISTLALSHSAQVLASASGRSSTTAHCQIRVWDVSGGLCQHLIFPHSTTVLALAFSPDDRLLVTLGDHDGRTLALWGTATYDLVSSTRLPEPVHGVAFNPWDAGELTCVGQGTVTFWLLQQRGADISLQVRREPVPEAVGAGELTSLCYGAPPLLYCGTSSGQVCVWDTRAGRCFLSWEADDGGIGLLLFSGSRLVSGSSTGRLRLWAVGAVSELRCKGSGASSVFMEHELVLDGAVVSASFDDSVDMGVVGTTAGTLWFVSWAEGTSTRLISGHRSKVNEVVFSPGESHCATCSEDGSVRVWALASMELVIQFQVLNQSCLCLAWSPPCCGRPEQQRLAAGYGDGSLRIFSVSRTAMELKMHPHPVALTTVAFSTDGQTVLSGDKDGLVAVSHPCTGTTFRVLSDHQGAPISTICVTCKECEDLGVEGTDLWLAASGDQRVSVWASDWLRNHCELVDWLSFPMPATTETQGHLPPSLAAFCPWDGALLMYVGPGVYKEVIIYNLCQKQVVEKIPLPFFAMSLSLSPGTHLLAVGFAECMLRLVDCAMGTAQDFAGHDNAVHLCRFTPSARLLFTAARNEILVWEVPGL

SEQ ID NO: 14226 - protein, 1750 aa, Homo Sapiens
MARAWQHPFLNVFRHFRVDEWKRSAKQGDVAVVTDKTLKGAVYRIRGSVSAANYIQLPKSSTQSLGLTGRYLYVLFRPLPSKHFVIHLDVSSKDNQVIRVSFSNLFKEFKSTATWLQFPLVLEARTPQRDLVGLAPSGARWTCLQLDLQDVLLVYLNRCYGHLKSIRLCASLLVRNLYTSDLCFEPAISGAQWAKLPVTPMPREMAFPVPKGESWHDRYIHVRFPSESLKVPSKPIEKSCSPPEAVLLGPGPQPLPCPVASSKPVRFSVSPVVQTPSPTASGRAALAPRPFPEVSLSQERSDASNADGPGFHSLEPWAQLEASDIHTAAAGTHVLTHESAEVPVARTGSCEGFLPDPVLRLKGVIGFGGHGTRQALWTPDGAAVVYPCHAVIVVLLVDTGEQRFFLGHTDKVSALALDGSSSLLASAQARAPSVMRLWDFQTGRCLCLFRSPMHVVCSLSFSDSGALLCGVGKDHHGRTMVVAWGTGQVGLGGEVVVLAKAHTDFDVQAFRVTFFDETRMASCGQGSVRLWRLRGGVLRSCPVDLGEHHALQFTDLAFKQARDGCPEPSAAMLFVCSRSGHILEIDCQRMVVRHARRLLPTRTPGGPHPQKQTFSSGPGIAISSLSVSPAMCAVGSEDGFLRLWPLDFSSVLLEAEHEGPVSSVCVSPDGLRVLSATSSGHLGFLDTLSRVYHMLARSHTAPVLALAMEQRRGQLATVSQDRTVRIWDLATLQQLYDFTSSEDAPCAVTFHPTRPTFFCGFSSGAVRSFSLEAAEVLVEHTCHRGAVTGLTATPDGRLLFSSCSQGSLAQYSCADPQWHVLRVAADMVCPDAPASPSALAVSRDGRLLAFVGPSRCTVTVMGSASLDELLRVDIGTLDLASSRLDSAMAVCFGPAALGHLLVSTSSNRVVVLDAVSGRIIRELPGVHPEPCPSLTLSEDARFLLIAAGRTIKVWDYATQASPGPQVYIGHSEPVQAVAFSPDQQQVLSAGDAVFLWDVLAPTESDQSFPGAPPACKTGPGAGPLEDAASRASELPRQQVPKPCQASPPRLGVCARPPEGGDGARDTRNSGAPRTTYLASCKAFTPARVSCSPHSAKGTCPPPASGGWLRLKAVVGYSGNGRANMVWRPDTGFFAYTCGRLVVVEDLHSGAQQHWSGHSAEISTLALSHSAQVLASASGRSSTTAHCQIRVWDVSGGLCQHLIFPHSTTVLALAFSPDDRLLVTLGDHDGRTLALWGTATYDLVSSTRLPEPVHGVAFNPWDAGELTCVGQGTVTFWLLQQRGADISLQVRREPVPEAVGAGELTSLCYGAPPLLYCGTSSGQVCVWDTRAGRCFLSWEADDGGIGLLLFSGSRLVSGSSTGRLRLWAVGAVSELRCKGSGARSSSVFMEHELVLDGAVVSASFDDSVDMGVVGTTAGTLWFVSWAEGTSTRLISGHRSKVNEVVFSPGESHCATCSEDGSVRVWALASMELVIQFQVLNQSCLCLAWSPPCCGRPEQQRLAAGYGDGSLRIFSVSRTAMELKMHPHPVALTTVAFSTDGQTVLSGDKDGLVAVSHPCTGTTFRVLSDHQGAPISTICVTCKECEDLGVEGTDLWLAASGDQRVSVWASDWLRNHCELVDWLSFPMPATTETQGHLPPSLAAFCPWDGALLMYVGPGVYKEVIIYNLCQKQVVEKIPLPFFAMSLSLSPGTHLLAVGFAECMLRLVDCAMGTAQDFAGHDNAVHLCRFTPSARLLFTAARNEILVWEVPGL

SEQ ID NO: 14227 - protein, 347 aa, Homo Sapiens
MLWFGQPGPGGWNRKCLRPFTLPRGQHPQPSYGFPQVNEVVFSPGESHCATCSEDGSVRVWALASMELVIQFQVLNQSCLCLAWSPPCCGRPEQQRLAAGYGDGSLRIFSVSRTAMELKMHPHPVALTTVAFSTDGQTVLSGDKDGLVAVSHPCTGTTFRVLSDHQGAPISTICVTCKECEDLGVEGTDLWLAASGDQRVSVWASDWLRNHCELVDWLSFPMPATTETQGHLPPSLAAFCPWDGALLMYVGPGVYKEVIIYNLCQKQVVEKIPLPFFAMSLSLSPGTHLLAVGFAECMLRLVDCAMGTAQDFAGHDNAVHLCRFTPSARLLFTAARNEILVWEVPGL

SEQ ID NO: 14228 - protein, 299 aa, Homo Sapiens
MLWFGQPGPGGWNRKCLRPFTLPRGQHPQPSYGFPQVNEVVFSPGESHCATCSEDGSVRVWALASMELVIQFQVLNQSCLCLAWSPPCCGRPEQQRLAAGYGDGSLRIFSVSRTAMELKMHPHPVALTTVAFSTDGQTVLSGDKDGLVAVSHPCTGTTFRVLSDHQGAPISTICVTCKETQGHLPPSLAAFCPWDGALLMYVGPGVYKEVIIYNLCQKQVVEKIPLPFFAMSLSLSPGTHLLAVGFAECMLRLVDCAMGTAQDFAGHDNAVHLCRFTPSARLLFTAARNEILVWEVPGL

SEQ ID NO: 14229 - protein, 78 aa, Homo Sapiens
  misc_feature (1)..(1): Xaa can be any naturally occurring amino acid
XASGDQRVSVWASDWLRNHCELVDWLSFPMPATTETQGHLPPSLAAFCPWDGALLMYVGPGVYKEVIIYNLCQKQSAC

SEQ ID NO: 14230 - protein, 133 aa, Homo Sapiens
  misc_feature (1)..(1): Xaa can be any naturally occurring amino acid
XPGAGPLEDAASRASELPRQQVPKPCQASPPRLGVCARPPEGGDGARDTRNSGAPRTTYLASCKAFTPARVSCSPHSAKALGHRWPCWAPAASGSPSSQGTCPPPASGGWLRLKAVVGYSGNGRANMVWRPDT

SEQ ID NO: 14231 - protein, 220 aa, Homo Sapiens
MPLTGVGPGSCRRQIIRALCLLLLLLHAGSAKNIWKRALPARLAEKSRAEEAGAPGGPRQPRADRCPPPPRTLPPGACQAARCQADSECPRHRRCCYNGCAYACLEAVPPPPVLDWLVQPKPRWLGGNGWLLDGPEEVLQAEACSTTEDGAEPLLCPSGYECHILSPGDVAEGIPNRGQCVKQRRQADGRILRHKLYKEYPEGDSKNVAEPGRGQQKHFQ

SEQ ID NO: 14232 - protein, 220 aa, Homo Sapiens; identical to SEQ ID NO: 14231

SEQ ID NO: 14233 - protein, 66 aa, Homo Sapiens
MPLTGVGPGSCRRQIIRALCLLLLLLHAGSAKNIWKRALPARLAEKSRVSAWDGEAGAACVGGSQP

SEQ ID NO: 14234 - protein, 79 aa, Homo Sapiens
MAPQTLLPVLVLCVLLLQAQGGYRDKKRMQKTQLSPEIKVCQQQPKLYLCKHLCESHRDCQANNICCSTYCGNVCMSIL

SEQ ID NO: 14235 - protein, 73 aa, Homo Sapiens
MAPQTLLLVLVLCVLLLQAQGGYRDKMRMQRIKVCEKRPSIDLCIHHCSYFQKCETNKICCSAFCGNICMSIL

SEQ ID NO: 14236 - protein, 89 aa, Homo Sapiens
MVSCERRASKSVGQILLWDFGYTCRLSHRRRNSTEILSRNLPALYTGIKVCEKRPSIDLCIHHCSYFQKCETNKICCSAFCGNICMSIL

SEQ ID NO: 14237 - protein, 87 aa, Homo Sapiens
MVSLMKLWIPMLMTFFCTVLLSVLGEMRKKRYDRKELLLEECWGKPNVKECTNKCSKAFRCKDKNYTCCWTYCGNICWINVETSGDY

SEQ ID NO: 14238 - protein, 87 aa, Homo Sapiens; identical to SEQ ID NO: 14237

SEQ ID NO: 14239 - protein, 87 aa, Homo Sapiens; identical to SEQ ID NO: 14237

SEQ ID NO: 14240 - protein, 111 aa, Homo Sapiens
MGSSSFLVLMVSLVLVTLVAVEGVKEGIEKAGVCPADNVRCFKSDPPQCHTDQDCLGERKCCYLHCGFKCVIPVKELEEGGNKDEDVSRPYPEPGWEAKCPGSSSTRCPQK

SEQ ID NO: 14241 - protein, 93 aa, Homo Sapiens
MKPVLPLQFLVVFCLALQLVPGSPKQRVLKYILEPPPCISAPENCTHLCTMQEDCEKGFQCCSSFCGIVCSSETFQKRNRIKHKGSEVIMPAN

SEQ ID NO: 14242 - protein, 73 aa, Homo Sapiens
MLQVQVNLPVSPLPTYPYSFFYPDKEGSCPQVNINFPQLGLCRDQCQVDSQCPGQMKCCRNGCGKVSCVTPNF

SEQ ID NO: 14243 - protein, 76 aa, Homo Sapiens
MPACRLGPLAAALLLSLLLFGFTLVSDKEGSCPQVNINFPQLGLCRDQCQVDSQCPGQMKCCRNGCGKVSCVTPNF

SEQ ID NO: 14244 - protein, 102 aa, Homo Sapiens
MPACRLGPLAAALLLSLLLFGFTLVSGTGAEKTGVCPELQADQNCTQECVSDSECADNLKCCSAGCATFCSLPNALFHWHLKTRRLWEISGPRPRRPTWDSS

SEQ ID NO: 14245 - protein, 124 aa, Homo Sapiens
MPACRLGPLAAALLLSLLLFGFTLVSGTGAEKTGVCPELQADQNCTQECVSDSECADNLKCCSAGCATFCSLPNDKEGSCPQVNINFPQLGLCRDQCQVDSQCPGQMKCCRNGCGKVSCVTPNF

SEQ ID NO: 14246 - protein, 79 aa, Homo Sapiens
MPACRLGPLAAALLLSLLLFGFTLVSGTGAEKTGVCPELQADQNCTQECVSDSECADNLKCCSAGCATFCSLPNGQLAE

SEQ ID NO: 14247 - protein, 137 aa, Homo Sapiens
MMLSCLFLLKALLALGSLESWITAGEHAKEGECPPHKNPCKELCQGDELCPAEQKCCTTGCGRICRDIPKGRGGDCPKVLVGLCIVGCVMDENCQAGEKCCKSGCGRFCVPPVLPPKLTMNPNWTVRSDSELEIPVP

SEQ ID NO: 14248 - protein, 231 aa, Homo Sapiens
MMLSCLFLLKALLALGSLESWITAGEHAKEGECPPHKNPCKELCQGDELCPAEQKCCTTGCGRICRDIPKGRKRDCPRVIRKQSCLKRCITDETCPGVKKCCTLGCNKSCVVPISKQKLAEFGGECPADPLPCEELCDGDASCPQGHKCCSTGCGRTCLGDIEGGRGGDCPKVLVGLCIVGCVMDENCQAGEKCCKSGCGRFCVPPVLPPKLTMNPNWTVRSDSELEIPVP

SEQ ID NO: 14249 - protein, 94 aa, Homo Sapiens
MMLSCLFLLKALLALGSLESWITAGEHGRGGDCPKVLVGLCIVGCVMDENCQAGEKCCKSGCGRFCVPPVLPPKLTMNPNWTVRSDSELEIPVP

SEQ ID NO: 14250 - protein, 225 aa, Homo Sapiens
  misc_feature (1)..(1): Xaa can be any naturally occurring amino acid
XIKEALLALGSLESWITAGEHAKEGECPPHKNPCKELCQGDELCPAEQKCCTTGCGRICRDIPKGRKRDCPRVIRKQSCLKRCITDETCPGVKKCCTLGCNKSCVVPISKQKLAEFGGECPADPLPCEELCDGDASCPQGHKCCSTGCGRTCLGDIEGGRGGDCPKVLVGLCIVGCVMDENCQAGEKCCKSGCGRFCVPPVLPPKLTMNPNWTVRSDSELEIPVP

SEQ ID NO: 14251 - protein, 123 aa, Homo Sapiens
MRTQSLLLLGALLAVGSQLPAVFGRKKGEKSGGCPPDDGPCLLSVPDQCVEDSQCPLTRKCCYRACFRQCVPRVSVKLGSCPEDQLRCLSPMNHLCHKDSDCSGKKRCCHSACGRDCRDPARG

SEQ ID NO: 14252 - protein, 224 aa, Homo Sapiens
MRTQSLLLLGALLAVGSQLPAVFGRKKGEKSGGCPPDDGPCLLSVPDQCVEDSQCPLTRKCCYRACFRQCVPRVSVKLGSCPEDQLRCLSPMNHLCHKDSDCSGKKRCCHSACGRDCRDPARGTAPGCPGQANSDLGSVALHLSWGPTERVHDGRPGALPAGQHYLYQRWFQPSDNHWPADTSLQPIHPWFLLLGVKVHSLSSEEGLCITPVLCTTAIRASHPS

SEQ ID NO: 14253 - protein, 131 aa, Homo Sapiens
MGLSGLLPILVPFILLGDIQEPGHAEGILGKPCPKIKVECEVEEIDQCTKPRDCPENMKCCPFSRGKKCLDFRKIYAVCHRRLAPAWPPYHTGGTIKKTKICSEFIYGGSQGNNNNFQTEAICLVTCKKYH

SEQ ID NO: 14254 - protein, 86 aa, Homo Sapiens
MGLSGLLPILVPFILLGDIQEPGHAEGILGKPCPKIKVECEVEEIDQCTKPRDCPENMKCCPFSRGKKCLDFRKVSLTLYHKEELE

SEQ ID NO: 14255 - protein, 241 aa, Homo Sapiens
MWTVRTEGGHFPLHSPTFSWRNVAFLLLLSLALEWTSAMLTKKIKHKPGLCPKERLTCTTELPDSCNTDFDCKEYQKCCFFACQKKCMDPFQEPCMLPVRHGNCNHEAQRWHFDFKNYRCTPFKYRGCEGNANNFLNEDACRTACMLIVKDGQCPLFPFTERKECPPSCHSDIDCPQTDKCCESRCGFVCARAWTVKKGFCPRKPLLCTKIDKPKCLQDEECPLVEKCCSHCGLKCMDPRR

SEQ ID NO: 14256 - protein, 241 aa, Homo Sapiens; identical to SEQ ID NO: 14255

SEQ ID NO: 14257 - protein, 548 aa, Homo Sapiens
MPALRPLLPLLLLLRLTSGAGLLPGLGSHPGVCPNQLSPNLWVDAQSTCERECSRDQDCAAAEKCCINVCGLHSCVAARFPGSPAAPTTAASCEGFVCPQQGSDCDIWDGQPVCRCRDRCEKEPSFTCASDGLTYYNRCYMDAEACLRGLHLHIVPCKHVLSWPPSSPGPPETTARPTPGAAPVPPALYSSPSPQAVQVGGTASLHCDVSGRPPPAVTWEKQSHQRENLIMRPDQMYGNVVVTSIGQLVLYNARPEDAGLYTCTARNAAGLLRADFPLSVVQREPARDAAPSIPAPAECLPDVQACTGPTSPHLVLWHYDPQRGGCMTFPARGCDGAARGFETYEACQQACARGPGDACVLPAVQGPCRGWEPRWAYSPLLQQCHPFVYGGCEGNGNNFHSRESCEDACPVPRTPPCRACRLRSKLALSLCRSDFAIVGRLTEVLEEPEAAGGIARVALEDVLKDDKMGLKFLGTKYLEVTLSGMDWACPCPNMTAGDGPLVIMGEVRDGVAVLDAGSYVRAASEKRVKKILELLEKQACELLNRFQD

SEQ ID NO: 14258 - protein, 483 aa, Homo Sapiens
MDVKGKKGPVGMPKEATCDHFMCLQQGSECDIWDGQPVCKCKDRCEKEPSFTCASDGLTYYNRCYMDAEACSKGITLAVVTCRYHFTWPNTSPPPPETTMHPTTASPETPELDMAAPALLNNPVHQSVTMGETVSFLCDVVGRPRPEITWEKQLEDRENVVMRPNHVRGNVVVTNIAQLVIYNAQLQDAGIYTCTARNVAGVLRADFPLSVVRGHQAAATSESSPNGTAFPAAECLKPPDSEDCGEEQTRWHFDAQANNCLTFTFGHCHRNLNHFETYEACMLACMSGPLAACSLPALQGPCKAYAPRWAYNSQTGQCQSFVYGGCEGNGNNFESREACEESCPFPRGNQRCRACKPRQKLVTSFCRSDFVILGRVSELTEEPDSGRALVTVDEVLKDEKMGLKFLGQEPLEVTLLHVDWACPCPNVTVSEMPLIIMGEVDGGMAMLRPDSFVGASSARRVRKLREVMHKKTCDVLKEFLGLH

SEQ ID NO: 14259 - protein, 576 aa, Homo Sapiens
MWAPRCRRFWSRWEQVAALLLLLLLLGVPPRSLALPPIRYSHAGICPNDMNPNLWVDAQSTCRRECETDQECETYEKCCPNVCGTKSCVAARYMDVKGKKGPVGMPKEATCDHFMCLQQGSECDIWDGQPVCKCKDRCEKEPSFTCASDGLTYYNRCYMDAEACSKGITLAVVTCRYHFTWPNTSPPPPETTMHPTTASPETPELDMAAPALLNNPVHQSVTMGETVSFLCDVVGRPRPEITWEKQLEDRENVVMRPNHVRGNVVVTNIAQLVIYNAQLQDAGIYTCTARNVAGVLRADFPLSVVRGHQAAATSESSPNGTAFPAAECLKPPDSEDCGEEQTRWHFDAQANNCLTFTFGHCHRNLNHFETYEACMLACMSGPLAACSLPALQGPCKAYAPRWAYNSQTGQCQSFVYGGCEGNGNNFESREACEESCPFPRGNQRCRACKPRQKLVTSFCRSDFVILGRVSELTEEPDSGRALVTVDEVLKDEKMGLKFLGQEPLEVTLLHVDWACPCPNVTVSEMPLIIMGEVDGGMAMLRPDSFVGASSARRVRKLREVMHKKTCDVLKEFLGLH

SEQ ID NO: 14260 - protein, 524 aa, Homo Sapiens
MANSAGFLGDLTTEGINKPGFYKGPAGSQVTLSSLGNQTRVLLEEQARHLLNEQEHATMAYYLDEYRGGSVSVEALVMALFKLLNTHAKFSLLSEVRGTISPQDLERFDHLVLRREIESMKARQPPGPGAGDTYSMVSYSDTGSSTGSHGTSTTVSSARNTLDLEETGEAVQGNINALPDVSVDDVRSTSQGLSSFKPLPRPPPLAQGNDLPLGQPRKLGREDLQPPSSMPSCSGTVFSAPQNRSPPAGTAPTPGTSSAQDLPSSPIYASVSPANPSSKRPLDAHLALVNQHPIGPFPRVQSPPHLKSPSAEATVAGGCLLPPSPSGHPDQTGTNQHFVMVEVHRPDSEPDVNEVRALPQTRTASTLSQLSDSGQTLSEDSGVDAGEAEASAPGRGRQSVSTKSRSSKELPRNERPTDGANKPPGLLEPTSTLVRVKKSAATLGIAIEGGANTRQPLPRIVTIQRGGSAHNCGQLKVGHVILEVNGLTLRGKEHREAARIIAEAFKTKDRDYIDFLVTEFNVML

SEQ ID NO: 14261 - protein, 556 aa, Homo Sapiens
MHGSLEALLFLPQVTLSLAHAHLICSNAQLEMCVFPHRFLGDLTTEGINKPGFYKGPAGSQVTLSSLGNQTRVLLEEQARHLLNEQEHATMAYYLDEYRGGSVSVEALVMALFKLLNTHAKFSLLSEVRGTISPQDLERFDHLVLRREIESMKARQPPGPGAGDTYSMVSYSDTGSSTGSHGTSTTVSSARNTLDLEETGEAVQGNINALPDVSVDDVRSTSQGLSSFKPLPRPPPLAQGNDLPLGQPRKLGREDLQPPSSMPSCSGTVFSAPQNRSPPAGTAPTPGTSSAQDLPSSPIYASVSPANPSSKRPLDAHLALVNQHPIGPFPRVQSPPHLKSPSAEATVAGGCLLPPSPSGHPDQTGTNQHFVMVEVHRPDSEPDVNEVRALPQTRTASTLSQLSDSGQTLSEDSGVDAGEAEASAPGRGRQSVSTKSRSSKELPRNERPTDGANKPPGLLEPTSTLVRVKKSAATLGIAIEGGANTRQPLPRIVTIQRGGSAHNCGQLKVGHVILEVNGLTLRGKEHREAARIIAEAFKTKDRDYIDFLVTEFNVML

SEQ ID NO: 14262 - protein, 345 aa, Homo Sapiens
MNAPLDGLSVSSSSTGSLGSAAGAGGGGGAGLRLLSANVRQLHQALTALLSEAEREQFTHCLNAYHARRNVFDLVRTLRVLLDSPVKRRLLPMLRLVIPRSDQLLFDQYTAEGLYLPATTPYRQPAWGGPDSAGPGEVRLVSLRRAKAHEGLGFSIRGGSEHGVGIYVSLVEPGSLAEKEGLRVGDQILRVNDKSLARVTHAEAVKALKGSKKLVLSVYSAGRIPGGYVTNHIYTWVDPQGRSISPPSGLPQPHGGALRQQEGDRRSTLHLLQGGDEKKVSGVGKGGQPLRHRILPPNPEQQSCLEAARRGWFCPGSVFPQVCTEGWCFFFAFLFDLCSVCYNTG

SEQ ID NO: 14263 - protein, 907 aa, Homo Sapiens
MNAPLDGLSVSSSSTGSLGSAAGAGGGGGAGLRLLSANVRQLHQALTALLSEAEREQFTHCLNAYHARRNVFDLVRTLRVLLDSPVKRRLLPMLRLVIPRSDQLLFDQYTAEGLYLPATTPYRQPAWGGPDSAGPGEVRLVSLRRAKAHEGLGFSIRGGSEHGVGIYVSLVEPGSLAEKEGLRVGDQILRVNDKSLARVTHAEAVKALKGSKKLVLSVYSAGRIPGGYVTNHIYTWVDPQGRSISPPSGLPQPHGGALRQQEGDRRSTLHLLQGGDEKKVNLVLGDGRSLGLTIRGGAEYGLGIYITGVDPGSEAEGSGLKVGDQILEVNGRSFLNILHDEAVRLLKSSRHLILTVKDVGRLPHARTTVDETKWIASSRIRETMANSAGFLGDLTTEGINKPGFYKGPAGSQVTLSSLGNQTRVLLEEQARHLLNEQEHATMAYYLDEYRGGSVSVEALVMALFKLLNTHAKFSLLSEVRGTISPQDLERFDHLVLRREIESMKARQPPGPGAGDTYSMVSYSDTGSSTGSHGTSTTVSSARNTLDLEETGEAVQGNINALPDVSVDDVRSTSQGLSSFKPLPRPPPLAQGNDLPLGQPRKLGREDLQPPSSMPSCSGTVFSAPQNRSPPAGTAPTPGTSSAQDLPSSPIYASVSPANPSSKRPLDAHLALVNQHPIGPFPRVQSPPHLKSPSAEATVAGGCLLPPSPSGHPDQTGTNQHFVMVEVHRPDSEPDVNEVRALPQTRTASTLSQLSDSGQTLSEDSGVDAGEAEASAPGRGRQSVSTKSRSSKELPRNERPTDGANKPPGLLEPTSTLVRVKKSAATLGIAIEGGANTRQPLPRIVTIQRGGSAHNCGQLKVGHVILEVNGLTLRGKEHREAARIIAEAFKTKDRDYIDFLVTEFNVML

SEQ ID NO: 14264 - protein, 128 aa, Homo Sapiens
GVNCDKANCSTTCFNGGTCFYPGKCICPPGLEGEQCEISKCPQPCRNGGKCIGKSKSVCEPGCGAHGTCHEPNKCQCQEGWHGRHCNKRYEASLIHALRPAGAQLRQHTPSLKKAEERRDPPESNYIW

SEQ ID NO: 14265 - protein, 133 aa, Homo Sapiens
MAPFTHDFRKAQQRMPAIPVNIHSMNFTWQAAGQAEYFYEFLSLRSLDKGIMADPTVNVPLLGTVPHKASVVQVGFPCLGKQDGVAAFEVDVIVMNSEGNTILQTPQNAIFFKTCQQAECPGGCRNGGFCNER

SEQ ID NO: 14266 - protein, 379 aa, Homo Sapiens
MARRSAFPAAALWLWSILLCLLALRAEAGPPQEESLYLWIDAHQARVLIGFEEDILIVSEGKMAPFTHDFRKAQQRMPAIPVNIHSMNFTWQAAGQAEYFYEFLSLRSLDKGIMADPTVNVPLLGTVPHKASVVQVGFPCLGKQDGVAAFEVDVIVMNSEGNTILQTPQNAIFFKTCQQAECPGGCRNGGFCNERRICECPDGFHGPHCEKALCTPRCMNGGLCVTPGFCICPPGFYGVNCDKANCSTTCFNGGTCFYPGKCICPPGLEGEQCEISKCPQPCRNGGKCIGKSKCKCSKGYQGDLCSKPVCEPGCGAHGTCHEPNKCQCQEGWHGRHCNKRYEASLIHALRPAGAQLRQHTPSLKKAEERRDPPESNYIW

SEQ ID NO: 14267 - protein, 122 aa, Homo Sapiens
MRWFLPWTLAAVTAAAASTVLATAGKKCLAVYQPEASMNFTLAGCISTRSYQPKYCGVCMDNRCCIPYKSKTIDVSFQCPDGLGFSRQVLWINACFCNLSCRNPNDIFADLESYPDFSEIAN

SEQ ID NO: 14268 - protein, 280 aa, Homo Sapiens
MRWFLPWTLAAVTAAAASTVLATALSPAPTTMDFTPAPLEDTSSRPQFCKWPCECPPSPPRCPLGVSLITDGCECCKMCAQQLGDNCTEAAICDPHRGLYCDYSGDRPRYAIGVCAHAVGEVEAWHRNCIAYTSPWSPCSTSCGLGVSTRISNVNAQCWPEQESRLCNLRPCDVDIHTLIKAGKKCLAVYQPEASMNFTLAGCISTRSYQPKYCGVCMDNRCCIPYKSKTIDVSFQCPDGLGFSRQVLWINACFCNLSCRNPNDIFADLESYPDFSEIAN

SEQ ID NO: 14269 - protein, 367 aa, Homo Sapiens
MRWFLPWTLAAVTAAAASTVLATALSPAPTTMDFTPAPLEDTSSRPQFCKWPCECPPSPPRCPLGVSLITDGCECCKMCAQQLGDNCTEAAICDPHRGLYCDYSGDRPRYAIGVCAQVVGVGCVLDGVRYNNGQSFQPNCKYNCTCIDGAVGCTPLCLRVRPPRLWCPHPRRVSIPGHCCEQWVCEDDAKRPRKTAPRDTGAFDAVGEVEAWHRNCIAYTSPWSPCSTSCGLGVSTRISNVNAQCWPEQESRLCNLRPCDVDIHTLIKAGKKCLAVYQPEASMNFTLAGCISTRSYQPKYCGVCMDNRCCIPYKSKTIDVSFQCPDGLGFSRQVLWINACFCNLSCRNPNDIFADLESYPDFSEIAN

SEQ ID NO: 14270 - protein, 155 aa, Homo Sapiens
MRWFLPWTLAAVTAAAASTVLATALSPAPTTMDFTPAPLEDTSSRPQFCKWPCECPPSPPRCPLGVSLITDGCECCKMCAQQLGDNCTEAAICDPHRGLYCDYSGDRPRYAIGVCARREEVSGCVPARGIHELHTCGLHQHTLLSTQVLWSLHGQ

SEQ ID NO: 14271 - protein, 36 aa, Homo Sapiens
MRWFLPWTLAAVTAAAASTVLATMLWVRWRHGTGTA

SEQ ID NO: 14272 - protein, 218 aa, Homo Sapiens
MRGTPKTHLLAFSLLCLLSKVRTQLCPTPCTCPWPPPRCPLGVPLVLDGCGCCRVCARRLGEPCDQLHVCDASQGLVCQPGAGPGGRGALCLCKQDPSFLALSLPCPLVSPAQNGARPGDPARPPVGWAWPPGCPTRTASADWRPSAACACPGPAHPPGVAVHKTVPSRAGLGMGTRCPPSPAGGPVPGPWADGRWSVPRPLAAGNTLAWVHHAEHQY

SEQ ID NO: 14273 - protein, 250 aa, Homo Sapiens
MRGTPKTHLLAFSLLCLLSKVRTQLCPTPCTCPWPPPRCPLGVPLVLDGCGCCRVCARRLGEPCDQLHVCDASQGLVCQPGAGPGGRGALCLLAEDDSSCEVNGRLYREGETFQPHCSIRCRCEDGGFTCVPLCSEDVRLPSWDCPHPRRVEVLGKCCPEWVCGQGGGLGTQPLPAQGPQFSGLVSSLPPGVPCPEWSTAWGPCSTTCGLGMATRVSNQNRFCRLETQRRLCLSRPCPPSRGRSPQNSAF

SEQ ID NO: 14274 - protein, 250 aa, Homo Sapiens; identical to SEQ ID NO: 14273

SEQ ID NO: 14275 - protein, 321 aa, Homo Sapiens [sequence omitted]

SEQ ID NO: 14276 - protein, 130 aa, Homo Sapiens
MGISNRVTNENSNCEMRKEKRLCYIQPCDSNILKTIKIPKGKTCQPTFQLSKAEKFVFSGCSSTQSYKPTFCGICLDKRCCIPNKSKMITIQFDCPNEGSFKWKMLWITSCVCQRNCREPGDIFSELKIL

SEQ ID NO: 14277 - protein, 372 aa, Homo Sapiens
MNKRRLLYPSGWLHGPSDMQGLLFSTLLLAGLAQFCCRVQGTGPLDTTPEGRPGEVSDAPQRKQFCHWPCKCPQQKPRCPPGVSLVRDGCGCCKICAKQPGEICNEADLCDPHKGLYCDYSVDRPRYETGVCAYLVAVGCEFNQVHYHNGQVFQPNPLFSCLCVSGAIGCTPLFIPKLAGSHCSGAKGGKKSDQSNCSLEPLLQQLSTSYKTMPAYRNLPLIWKKKCLVQATKWTPCSRTCGMGISNRVTNENSNCEMRKEKRLCYIQPCDSNILKTIKIPKGKTCQPTFQLSKAEKFVFSGCSSTQSYKPTFCGICLDKRCCIPNKSKMITIQFDCPNEGSFKWKMLWITSCVCQRNCREPGDIFSELKIL

SEQ ID NO: 14278 - protein, 237 aa, Homo Sapiens
MNKRRLLYPSGWLHGPSDMQGLLFSTLLLAGLAQFCCRVQGTGPLDTTPEGRPGEVSDAPQRKQFCHWPCKCPQQKPRCPPGVSLVRDGCGCCKICAKQPGEICNEADLCDPHKGLYCDYSVDRPRYETGVCAYLVAVGCEFNQVHYHNGQVFQPNPLFSCLCVSGAIGCTPLFIPKLAGSHCSGAKGGKKSDQSNCSLEPLLQQLSTSYKTMPDVCQASNLLPALRSLNCCLPSSL

SEQ ID NO: 14279 - protein, 354 aa, Homo Sapiens
MQGLLFSTLLLAGLAQFCCRVQGTGPLDTTPEGRPGEVSDAPQRKQFCHWPCKCPQQKPRCPPGVSLVRDGCGCCKICAKQPGEICNEADLCDPHKGLYCDYSVDRPRYETGVCAYLVAVGCEFNQVHYHNGQVFQPNPLFSCLCVSGAIGCTPLFIPKLAGSHCSGAKGGKKSDQSNCSLEPLLQQLSTSYKTMPAYRNLPLIWKKKCLVQATKWTPCSRTCGMGISNRVTNENSNCEMRKEKRLCYIQPCDSNILKTIKIPKGKTCQPTFQLSKAEKFVFSGCSSTQSYKPTFCGICLDKRCCIPNKSKMITIQFDCPNEGSFKWKMLWITSCVCQRNCREPGDIFSELKIL

SEQ ID NO: 14280 - protein, 354 aa, Homo Sapiens; identical to SEQ ID NO: 14279

SEQ ID NO: 14281 - protein, 354 aa, Homo Sapiens; identical to SEQ ID NO: 14279

SEQ ID NO: 14282 - protein, 219 aa, Homo Sapiens
MQGLLFSTLLLAGLAQFCCRVQGTGPLDTTPEGRPGEVSDAPQRKQFCHWPCKCPQQKPRCPPGVSLVRDGCGCCKICAKQPGEICNEADLCDPHKGLYCDYSVDRPRYETGVCAYLVAVGCEFNQVHYHNGQVFQPNPLFSCLCVSGAIGCTPLFIPKLAGSHCSGAKGGKKSDQSNCSLEPLLQQLSTSYKTMPDVCQASNLLPALRSLNCCLPSSL

SEQ ID NO: 14283 - protein, 2382 aa, Homo Sapiens
MSGGAAEKQSSTPGSLFLSPPAPAPKNGSSSDSSVGEKLGAAAADAVTGRTEEYRRRRHTMDKDSRGAAATTTTTEHRFFRRSVICDSNATALELPGLPLSLPQPSIPAAVPQSAPPEPHREETVTATATSQVAQQPPAAAAPGEQAVAGPAPSTVPSSTSKDRPVSQPSLVGSKEEPPPARSGSGGGSAKEPQEERSQQQDDIEELETKAVGMSNDGRFLKFDIEIGRGSFKTVYKGLDTETTVEVAWCELQDRKLTKSERQRFKEEAEMLKGLQHPNIVRFYDSWESTVKGKKCIVLVTELMTSGTLKTYLKRFKVMKIKVLRSWCRQILKGLQFLHTRTPPIIHRDLKCDNIFITGPTGSVKIGDLGLATLKRASFAKSVIGTPEFMAPEMYEEKYDESVDVYAFGMCMLEMATSEYPYSECQNAAQIYRRVTSGVKPASFDKVAIPEVKEIIEGCIRQNKDERYSIKDLLNHAFFQEETGVRVELAEEDDGEKIAIKLWLRIEDIKKLKGKYKDNEAIEFSFDLERDVPEDVAQEMVESGYVCEGDHKTMAKAIKDRVSLIKRKREQRQLVREEQEKKKQEESSLKQQVEQSSASQTGIKQLPSASTGIPTASTTSASVSTQVEPEEPEADQHQQLQYQQPSISVLSDGTVDSGQGSSVFTESRVSSQQTVSYGSQHEQAHSTGTVPGHIPSTVQAQSQPHGVYPPSSVAQGQSQGQPSSSSLTGVSSSQPIQHPQQQQGIQQTAPPQQTVQYSLSQTSTSSEATTAQPVSQPQAPQVLPQVSAGKQLPVSQPVPTIQGEPQIPVATQPSVVPVHSGAHFLPVGQPLPTPLLPQYPVSQIPISTPHVSTAQTGFSSLPITMAAGITQPLLTLASSATTAAIPGVSTVVPSQLPTLLQPVTQLPSQVHPQLLQPAVQSMGIPANLGQAAEVPLSSGDVLYQGFPPRLPPQYPGDSNIAPSSNVASVCIHSTVLSPPMPTEVLATPGYFPTVVQPYVESNLLVPMGGVGGQVQVSQPGGSLAQAPTTSSQQAVLESTQGVSQVAPAEPVAVAQTQATQPTTLASSVDSAHSDVASGMSDGNENVPSSSGRHEGRTTKRHYRKSVRSRSRHEKTSRPKLRILNVSNKGDRVVECQLETHNRKMVTFKFDLDGDNPEEIATIMVNNDFILAIERESFVDQVREIIEKADEMLSEDVSVEPEGDQGLESLQGKDDYGFSGSQKLEGEFKQPIPASSMPQQIGIPTSSLTQVVHSAGRRFIVSPVPESRLRESKVFPSEITDTVAASTAQSPGMNLSHSASSLSLQQAFSELRRAQMTEGPNTAPPNFSHTGPTFPVVPPFLSSIAGVPTTAAATAPVPATSSPPNDISTSVIQSEVTVPTEEGIAGVATSTGVVTSGGLPIPPVSESPVLSSVVSSITIPAVVSISTTSPSLQVPTSTSEIVVSSTALYPSVTVSATSASAGGSTATPGPKPPAVVSQQAAGSTTVGATLTSVSTTTSFPSTASQLCIQLSSSTSTPTLAETVVVSAHSLDKTSHSSTTGLAFSLSAPSSSSSPGAGVSSYISQPGGLHPLVIPSVIASTPILPQAAGPTSTPLLPQVPSIPPLVQPVANVPAVQQTLIHSQPQPALLPNQPHTHCPEVDSDTQPKAPGIDDIKTLEEKLRSLFSEHSSSGAQHASVSLETSLVIESTVTPGIPTTAVAPSKLLTSTTSTCLPPTNLPLGTVALPVTPVVTPGQVSTPVSTTTSGVKPGTAPSKPPLTKAPVLPVGTELPAGTLPSEQLPPFPGPSLTQSQQPLEDLDAQLRRTLSPEMITVTSAVGPVSMAAPTAITEAGTQPQKGVSQVKEGPVLATSSGAGVFKMGRFQVSVAADGAQKEGKNKSEDAKSVHFESSTSESSVLSSSSPESTLVKPEPNGITIPGISSDVPESAHKTTASEAKSDTGQPTKVGRFQVTTTANKVGRFSVSKTEDKITDTKKEGPVASPPFMDLEQAVLPAVIPKKEKPELSEPSHLNGPSSDPEAAFLSRDVDDGSGSPHSPHQLSSKSLPSQNLSQSLSNSFNSSYMSSDNESDIEDEDLKLELRRLRDKHLKEIQDLQSRQKHEIESLYTKLGKVPPAVIIPPAAPLSGRRRRPTKSKGSKSSRSSSLGNKSPQLSGNLSGQSAASVLHPQQTLHPPGNIPESGQNQLLQPLKPSPSSDNLYSAFTSDGAISVPSLSAPGQGTSSTNTVGATVNSQAAQAQPPAMTSSRKGTFTDDLHKLVDNWARDAMNLSGRRGSKGHMNYEGPGMARKFSAPGQLCISMTSNLGGSAPISAASATSLGHFTKSMCPPQQYGFPATPFGAQWSGTGGPAPQPLGQFQPVGTASLQNFNISNLQKSISNPPGSNLRTT

SEQ ID NO: 14284 - protein, 2634 aa, Homo Sapiens
MSGGAAEKQSSTPGSLFLSPPAPAPKNGSSSDSSVGEKLGAAAADAVTGRTEEYRRRRHTMDKDSRGAAATTTTTEHRFFRRSVICDSNATALELPGLPLSLPQPSIPAAVPQSAPPEPHREETVTATATSQVAQQPPAAAAPGEQAVAGPAPSTVPSSTSKDRPVSQPSLVGSKEEPPPARSGSGGGSAKEPQEERSQQQDDIEELETKAVGMSNDGRFLKFDIEIGRGSFKTVYKGLDTETTVEVAWCELQDRKLTKSERQRFKEEAEMLKGLQHPNIVRFYDSWESTVKGKKCIVLVTELMTSGTLKTYLKRFKVMKIKVLRSWCRQILKGLQFLHTRTPPIIHRDLKCDNIFITGPTGSVKIGDLGLATLKRASFAKSVIGTPEFMAPEMYEEKYDESVDVYAFGMCMLEMATSEYPYSECQNAAQIYRRVTSGVKPASFDKVAIPEVKEIIEGCIRQNKDERYSIKDLLNHAFFQEETGVRVELAEEDDGEKIAIKLWLRIEDIKKLKGKYKDNEAIEFSFDLERDVPEDVAQEMVESGYVCEGDHKTMAKAIKDRVSLIKRKREQRQLVREEQEKKKQEESSLKQQVEQSSASQTGIKQLPSASTGIPTASTTSASVSTQVEPEEPEADQHQQLQYQQPSISVLSDGTVDSGQGSSVFTESRVSSQQTVSYGSQHEQAHSTGTVPGHIPSTVQAQSQPHGVYPPSSVPRRGRSMSVCVPIFLLLPLCPASLPVLFHPTASTVCTSFSFPPPDCPEETFAEKLSKALESVLPMHSASQRKHRRSSLPSLFVSTPQSMAHPCGGTPTYPESQIFFPTIHERPVSFSPPPTCPPKVAISQRRKSTSFLEAQTHHFQPLLRTVGQSLLPPGGSPTNWTPEAVVMLGTTASRVTGESCEIQVHPMFEPSQVYSDYRPGLVLPEEAHYFIPQEAVYVAGVHYQARVAEQYEGIPYNSSVLSSPMKQIPEQKPVQGGPTSSSVFEFPSGQAFLVGHLQNLRLDSGLGPGSPLSSISAPISTDATRLKFHPVFVPHSAPAVLTHNNESRSNCVFEFHVHTPSSSSGEGGGILPQRVYRNRQVAVDLNQEELPPQSVGLHGYLQPVTEEKHNYHAPELTVSVVEPIGQNWPIGSPEYSSDSSQITSSDPSDFQSPPPTGGAAAPFGSDVSMPFIHLPQTVLQESPLFFCFPQGTTSQQVLTASFSSGGSALHPQAQGQSQGQPSSSSLTGVSSSQPIQHPQQQQGIQQTAPPQQTVQYSLSQTSTSSEATTAQPVSQPQAPQVLPQVSAGKQSTQGVSQVAPAEPVAVAQTQATQPTTLASSVDSAHSDVASGMSDGNENVPSSSGRHEGRTTKRHYRKSVRSRSRHEKTSRPKLRILNVSNKGDRVVECQLETHNRKMVTFKFDLDGDNPEEIATIMVNNDFILAIERESFVDQVREIIEKADEMLSEDVSVEPEGDQGLESLQGKDDYGFSGSQKLEGEFKQPIPASSMPQQIGIPTSSLTQVVHSAGRRFIVSPVPESRLRESKVFPSEITDTVAASTAQSPGMNLSHSASSLSLQQAFSELRRAQMTEGPNTAPPNFSHTGPTFPVVPPFLSSIAGVPTTAAATAPVPATSSPPNDISTSVIQSEVTVPTEEGIAGVATSTGVVTSGGLPIPPVSESPVLSSVVSSITIPAVVSISTTSPSLQVPTSTSEIVVSSTALYPSVTVSATSASAGGSTATPGPKPPAVVSQQAAGSTTVGATLTSVSTTTSFPSTASQLCIQLSSSTSTPTLAETVVVSAHSLDKTSHSSTTGLAFSLSAPSSSSSPGAGVSSYISQPGGLHPLVIPSVIASTPILPQAAGPTSTPLLPQVPSIPPLVQPVANVPAVQQTLIHSQPQPALLPNQPHTHCPEVDSDTQPKAPGIDDIKTLEEKLRSLFSEHSSSGAQHASVSLETSLVIESTVTPGIPTTAVAPSKLLTSTTSTCLPPTNLPLGTVALPVTPVVTPGQVSTPVSTTTSGVKPGTAPSKPPLTKAPVLPVGTELPAGTLPSEQLPPFPGPSLTQSQQPLEDLDAQLRRTLSPEMITVTSAVGPVSMAAPTAITEAGTQPQKGVSQVKEGPVLATSSGAGVFKMGRFQVSVAADGAQKEGKNKSEDAKSVHFESSTSESSVLSSSSPESTLVKPEPNGITIPGISSDVPESAHKTTASEAKSDTGQPTKVGRFQVTTTANKVGRFSVSKTEDKITDTKKEGPVASPPFMDLEQAVLPAVIPKKEKPELSEPSHLNGPSSDPEAAFLSRDVDDGSGSPHSPHQLSSKSLPSQNLSQSLSNSFNSSYMSSDNESDIEDEDLKLELRRLRDKHLKEIQDLQSRQKHEIESLYTKLGKVPPAVIIPPAAPLSGRRRRPTKSKGSKSSRSSSLGNKSPQLSGNLSGQSAASVLHPQQTLHPPGNIPESGQNQLLQPLKPSPSSDNLYSAFTSDGAISVPSLSAPGQGTSSTNTVGATVNSQAAQAQPPAMTSSRKGTFTDDLHKLVDNWARDAMNLSGRRGSKGHMNYEGPGMARKFSAPGQLCISMTSNLGGSAPISAASATSLGHFTKSMCPPQQYGFPATPFGAQWSGTGGPAPQPLGQFQPVGTASLQNFNISNLQKSISNPPGSNLRTT

SEQ ID NO: 14285 - protein, 393 aa, Homo Sapiens
MSGGAAEKQSSTPGSLFLSPPAPAPKNGSSSDSSVGEKLGAAAADAVTGRTEEYRRRRHTMDKDSRGAAATTTTTEHRFFRRSVICDSNATALELPGLPLSLPQPSIPAAVPQSAPPEPHREETVTATATSQVAQQPPAAAAPGEQAVAGPAPSTVPSSTSKDRPVSQPSLVGSKEEPPPARSGSGGGSAKEPQEERSQQQDDIEELETKAVGMSNDGRFLKFDIEIGRGSFKTVYKGLDTETTVEVAWCELQDRKLTKSERQRFKEEAEMLKGLQHPNIVRFYDSWESTVKGKKCIVLVTELMTSGTLKTYLKRFKVMKIKVLRSWCRQILKGLQFLHTRTPPIIHRDLKCDNIFITGPTGSVKIGDLGLATLKRASFAKSVIGMFQVYLGA

SEQ ID NO: 14286 - protein, 2134 aa, Homo Sapiens
MSGGAAEKQSSTPGSLFLSPPAPAPKNGSSSDSSVGEKLGAAAADAVTGRTEEYRRRRHTMDKDSRGAAATTTTTEHRFFRRSVICDSNATALELPGLPLSLPQPSIPAAVPQSAPPEPHREETVTATATSQVAQQPPAAAAPGEQAVAGPAPSTVPSSTSKDRPVSQPSLVGSKEEPPPARSGSGGGSAKEPQEERSQQQDDIEELETKAVGMSNDGRFLKFDIEIGRGSFKTVYKGLDTETTVEVAWCELQDRKLTKSERQRFKEEAEMLKGLQHPNIVRFYDSWESTVKGKKCIVLVTELMTSGTLKTYLKRFKVMKIKVLRSWCRQILKGLQFLHTRTPPIIHRDLKCDNIFITGPTGSVKIGDLGLATLKRASFAKSVIGTPEFMAPEMYEEKYDESVDVYAFGMCMLEMATSEYPYSECQNAAQIYRRVTSGVKPASFDKVAIPEVKEIIEGCIRQNKDERYSIKDLLNHAFFQEETGVRVELAEEDDGEKIAIKLWLRIEDIKKLKGKYKDNEAIEFSFDLERDVPEDVAQEMVESGYVCEGDHKTMAKAIKDRVSLIKRKREQRQLVREEQEKKKQEESSLKQQVEQSSASQTGIKQLPSASTGIPTASTTSASVSTQVEPEEPEADQHQQLQYQQPSISVLSDGTVDSGQGSSVFTESRVSSQQTVSYGSQHEQAHSTGTVPGHIPSTVQAQSQPHGVYPPSSVAQGQSQGQPSSSSLTGVSSSQPIQHPQQQGIQQTAPPQQTVQYSLSQTSTSSEATTAQPVSQPQAPQVLPQVSAGKQSTQGVSQVAPAEPVAVAQTQATQPTTLASSVDSAHSDVASGMSDGNENVPSSSGRHEGRTTKRHYRKSVRSRSRHEKTSRPKLRILNVSNKGDRVVECQLETHNRKMVTFKFDLDGDNPEEIATIMVNNDFILAIERESFVDQVREIIEKADEMLSEDVSVEPEGDQGLESLQGKDDYGFSGSQKLEGEFKQPIPASSMPQQIGIPTSSLTQVVHSAGRRFIVSPVPESRLRESKVFPSEITDTVAASTAQSPGMNLSHSASSLSLQQAFSELRRAQMTEGPNTAPPNFSHTGPTFPVVPPFLSSIAGVPTTAAATAPVPATSSPPNDISTSVIQSEVTVPTEEGIAGVATSTGVVTSGGLPIPPVSESPVLSSVVSSITIPAVVSISTTSPSLQVPTSTSEIVVSSTALYPSVTVSATSASAGGSTATPGPKPPAVVSQQAAGSTTVGATLTSVSTTTSFPSTASQLCIQLSSSTSTPTLAETVVVSAHSLDKTSHSSTTGLAFSLSAPSSSSSPGAGVSSYISQPGGLHPLVIPSVIASTPILPQAAGPTSTPLLPQVPSIPPLVQPVANVPAVQQTLIHSQPQPALLPNQPHTHCPEVDSDTQPKAPGIDDIKTLEEKLRSLFSEHSSSGAQHASVSLETSLVIESTVTPGIPTTAVAPSKLLTSTTSTCLPPTNLPLGTVALPVTPVVTPGQVSTPVSTTTSGVKPGTAPSKPPLTKAPVLPVGTELPAGTLPSEQLPPFPGPSLTQSQQPLEDLDAQLRRTLSPEMITVTSAVGPVSMAAPTAITEAGTQPQKVSQVKEGPVLATSSGAGVFKMGRFQVSVAADGAQKEGKNKSEDAKSVHFESSTSESSVLSSSSPESTLVKPEPNGITIPGISSDVPESAHKTTASEAKSDTGQPTKVGRFQVTTTANKVGRFSVSKTEDKITDTKKEGPVASPPFMDLEQAVLPAVIPKKEKPELSEPSHLNGPSSDPEAAFLSRDVDDGSGSPHSPHQLSSKSLPSQNLSQSLSNSFNSSYMSSDNESDIEDEDLKLELRRLRDKHLKEIQDLQSRQKHEIESLYTKLGKVPPAVIIPPAAPLSGRRRRPTKSKGSKSSRSSSLGNKSPQLSGNLSGQSAASVLHPQQTLHPPGNIPESGQNQLLQPLKPSPSSDNLYSAFTSDGAISVPSLSAPGQGTSSTNTVGATVNSQAAQAQPPAMTSSRKGTFTDDLHKLVDNWARDAMNLSGRRGSKGHMNYEGPGMARKFSAPGQLCISMTSNLGGSAPISAASATSLGHFTKSMCPPQQYGFPATPFGAQWSGTGGPAPQPLGQFQPVGTASLQNFNISNLQKSISNPPGSNLRTT

SEQ ID NO: 14287 - protein, 2833 aa, Homo Sapiens
MSGGAAEKQSSTPGSLFLSPPAPAPKNGSSSDSSVGEKLGAAAADAVTGRTEEYRRRRHTMDKDSRGAAATTTTTEHRFFRRSVICDSNATALELPGLPLSLPQPSIPAAVPQSAPPEPHREETVTATATSQVAQQPPAAAAPGEQAVAGPAPSTVPSSTSKDRPVSQPSLVGSKEEPPPARSGSGGGSAKEPQEERSQQQDDIEELETKAVGMSNDGRFLKFDIEIGRGSFKTVYKGLDTETTVEVAWCELQDRKLTKSERQRFKEEAEMLKGLQHPNIVRFYDSWESTVKGKKCIVLVTELMTSGTLKTYLKRFKVMKIKVLRSWCRQILKGLQFLHTRTPPIIHRDLKCDNIFITGPTGSVKIGDLGLATLKRASFAKSVIGTPEFMAPEMYEEKYDESVDVYAFGMCMLEMATSEYPYSECQNAAQIYRRVTSGVKPASFDKVAIPEVKEIIEGCIRQNKDERYSIKDLLNHAFFQEETGVRVELAEEDDGEKIAIKLWLRIEDIKKLKGKYKDNEAIEFSFDLERDVPEDVAQEMVESGYVCEGDHKTMAKAIKDRVSLIKRKREQRQLVREEQEKKKQEESSLKQQVEQSSASQTGIKQLPSASTGIPTASTTSASVSTQVEPEEPEADQHQQLQYQQPSISVLSDGTVDSGQGSSVFTESRVSSQQTVSYGSQHEQAHSTGTVPGHIPSTVQAQSQPHGVYPPSSVPQSMAHPCGGTPTYPESQIFFPTIHERPVSFSPPPTCPPKVAISQRRKSTSFLEAQTHHFQPLLRTVGQSLLPPGGSPTNWTPEAVVMLGTTASRVTGESCEIQVHPMFEPSQVYSDYRPGLVLPEEAHYFIPQEAVYVAGVHYQARVAEQYEGIPYNSSVLSSPMKQIPEQKPVQGGPTSSSVFEFPSGQAFLVGHLQNLRLDSGLGPGSPLSSISAPISTDATRLKFHPVFVPHSAPAVLTHNNESRSNCVFEFHVHTPSSSSGEGGGILPQRVYRNRQVAVDLNQEELPPQSVGLHGYLQPVTEEKHNYHAPELTVSVVEPIGQNWPIGSPEYSSDSSQITSSDPSDFQSPPPTGGAAAPFGSDVSMPFIHLPQTVLQESPLFFCFPQGTTSQQVLTASFSSGGSALHPQAQGQSQGQPSSSSLTGVSSSQPIQHPQQQQGIQQTAPPQQTVQYSLSQTSTSSEATTAQPVSQPQAPQVLPQVSAGKQLPVSQPVPTIQGEPQIPVATQPSVVPVHSGAHFLPVGQPLPTPLLPQYPVSQIPISTPHVSTAQTGFSSLPITMAAGITQPLLTLASSATTAAIPGVSTVVPSQLPTLLQPVTQLPSQVHPQLLQPAVQSMGIPANLGQAAEVPLSSGDVLYQGFPPRLPPQYPGDSNIAPSSNVASVCIHSTVLSPPMPTEVLATPGYFPTVVQPYVESNLLVPMGGVGGQVQVSQPGGSLAQAPTTSSQQAVLESTQGVSQVAPAEPVAVAQTQATQPTTLASSVDSAHSDVASGMSDGNENVPSSSGRHEGRTTKRHYRKSVRSRSRHEKTSRPKLRILNVSNKGDRVVECQLETHNRKMVTFKFDLDGDNPEEIATIMVNNDFILAIERESFVDQVREIIEKADEMLSEDVSVEPEGDQGLESLQGKDDYGFSGSQKLEGEFKQPIPASSMPQQIGIPTSSLTQVVHSAGRRFIVSPVPESRLRESKVFPSEITDTVAASTAQSPGMNLSHSASSLSLQQAFSELRRAQMTEGPNTAPPNFSHTGPTFPVVPPFLSSIAGVPTTAAATAPVPATSSPPNDISTSVIQSEVTVPTEEGIAGVATSTGVVTSGGLPIPPVSESPVLSSVVSSITIPAVVSISTTSPSLQVPTSTSEIVVSSTALYPSVTVSATSASAGGSTATPGPKPPAVVSQQAAGSTTVGATLTSVSTTTSFPSTASQLCIQLSSSTSTPTLAETVVVSAHSLDKTSHSSTTGLAFSLSAPSSSSSPGAGVSSYISQPGGLHPLVIPSVIASTPILPQAAGPTSTPLLPQVPSIPPLVQPVANVPAVQQTLIHSQPQPALLPNQPHTHCPEVDSDTQPKAPGIDDIKTLEEKLRSLFSEHSSSGAQHASVSLETSLVIESTVTPGIPTTAVAPSKLLTSTTSTCLPPTNLPLGTVALPVTPVVTPGQVSTPVSTTTSGVKPGTAPSKPPLTKAPVLPVGTELPAGTLPSEQLPPFPGPSLTQSQQPLEDLDAQLRRTLSPEMITVTSAVGPVSMAAPTAITEAGTQPQKGVSQVKEGPVLATSSGAGVFKMGRFQVSVAADGAQKEGKNKSEDAKSVHFESSTSESSVLSSSSPESTLVKPEPNGITIPGISSDVPESAHKTTASEAKSDTGQPTKVGRFQVTTTANKVGRFSVSKTEDKITDTKKEGPVASPPFMDLEQAVLPAVIPKKEKPELSEPSHLNGPSSDPEAAFLSRDVDDGSGSPHSPHQLSSKSLPSQNLSQSLSNSFNSSYMSSDNESDIEDEDLKLELRRLRDKHLKEIQDLQSRQKHEIESLYTKLGKVPPAVIIPPAAPLSGRRRRPTKSKGSKSSRSSSLGNKSPQLSGNLSGQSAASVLHPQQTLHPPGNIPESGQNQLLQPLKPSPSSDNLYSAFTSDGAISVPSLSAPGQGCAKFNCASEQVTFKPGGRRTRFLRKMVKKVCPCNQLCRTSSTNTVGATVNSQAAQAQPPAMTSSRKGTFTDDLHKLVDNWARDAMNLSGRRGSKGHMNYEGPGMARKFSAPGQLCISMTSNLGGSAPISAASATSLGHFTKSMCPPQQYGFPATPFGAQWSGTGGPAPQPLGQFQPVGTASLQNFNISNLQKSISNPPGSNLRTT

SEQ ID NO: 14288 - protein, 2642 aa, Homo Sapiens
MSGGAAEKQSSTPGSLFLSPPAPAPKNGSSSDSSVGEKLGAAAADAVTGRTEEYRRRRHTMDKDSRGAAATTTTTEHRFFRRSVICDSNATALELPGLPLSLPQPSIPAAVPQSAPPEPHREETVTATATSQVAQQPPAAAAPGEQAVAGPAPSTVPSSTSKDRPVSQPSLVGSKEEPPPARSGSGGGSAKEPQEERSQQQDDIEELETKAVGMSNDGRFLKFDIEIGRGSFKTVYKGLDTETTVEVAWCELQDRKLTKSERQRFKEEAEMLKGLQHPNIVRFYDSWESTVKGKKCIVLVTELMTSGTLKTYLKRFKVMKIKVLRSWCRQILKGLQFLHTRTPPIIHRDLKCDNIFITGPTGSVKIGDLGLATLKRASFAKSVIGTPEFMAPEMYEEKYDESVDVYAFGMCMLEMATSEYPYSECQNAAQIYRRVTSGVKPASFDKVAIPEVKEIIEGCIRQNKDERYSIKDLLNHAFFQEETGVRVELAEEDDGEKIAIKLWLRIEDIKKLKGKYKDNEAIEFSFDLERDVPEDVAQEMVESGYVCEGDHKTMAKAIKDRVSLIKRKREQRQLVREEQEKKKQEESSLKQQVEQSSASQTGIKQLPSASTGIPTASTTSASVSTQVEPEEPEADQHQQLQYQQPSISVLSDGTVDSGQGSSVFTESRVSSQQTVSYGSQHEQAHSTGTVPGHIPSTVQAQSQPHGVYPPSSVPQSMAHPCGGTPTYPESQIFFPTIHERPVSFSPPPTCPPKVAISQRRKSTSFLEAQTHHFQPLLRTVGQSLLPPGGSPTNWTPEAVVMLGTTASRVTGESCEIQVHPMFEPSQVYSDYRPGLVLPEEAHYFIPQEAVYVAGVHYQARVAEQYEGIPYNSSVLSSPMKQIPEQKPVQGGPTSSSVFEFPSGQAFLVGHLQNLRLDSGLGPGSPLSSISAPISTDATRLKFHPVFVPHSAPAVLTHNNESRSNCVFEFHVHTPSSSSGEGGGILPQRVYRNRQVAVDLNQEELPPQSVGLHGYLQPVTEEKHNYHAPELTVSVVEPIGQNWPIGSPEYSSDSSQITSSDPSDFQSPPPTGGAAAPFGSDVSMPFIHLPQTVLQESPLFFCFPQGTTSQQVLTASFSSGGSALHPQAQGQSQGQPSSSSLTGVSSSQPIQHPQQQQGIQQTAPPQQTVQYSLSQTSTSSEATTAQPVSQPQAPQVLPQVSAGKQGFPPRLPPQYPGDSNIAPSSNVASVCIHSTVLSPPMPTEVLATPGYFPTVVQPYVESNLLVPMGGVGGQVQVSQPGGSLAQAPTTSSQQAVLESTQGVSQVAPAEPVAVAQTQATQPTTLASSVDSAHSDVASGMSDGNENVPSSSGRHEGRTTKRHYRKSVRSRSRHEKTSRPKLRILNVSNKGDRVVECQLETHNRKMVTFKFDLDGDNPEEIATIMVNNDFILAIERESFVDQVREIIEKADEMLSEDVSVEPEGDQGLESLQGKDDYGFSGSQKLEGEFKQPIPASSMPQQIGIPTSSLTQVVHSAGRRFIVSPVPESRLRESKVFPSEITDTVAASTAQSPGMNLSHSASSLSLQQAFSELRRAQMTEGPNTAPPNFSHTGPTFPVVPPFLSSIAGVPTTAAATAPVPATSSPPNDISTSVIQSEVTVPTEEGIAGVATSTGVVTSGGLPIPPVSESPVLSSVVSSITIPAVVSISTTSPSLQVPTSTSEIVVSSTALYPSVTVSATSASAGGSTATPGPKPPAVVSQQAAGSTTVGATLTSVSTTTSFPSTASQLCIQLSSSTSTPTLAETVVVSAHSLDKTSHSSTTGLAFSLSAPSSSSSPGAGVSSYISQPGGLHPLVIPSVIASTPILPQAAGPTSTPLLPQVPSIPPLVQPVANVPAVQQTLIHSQPQPALLPNQPHTHCPEVDSDTQPKAPGIDDIKTLEEKLRSLFSEHSSSGAQHASVSLETSLVIESTVTPGIPTTAVAPSKLLTSTTSTCLPPTNLPLGTVALPVTPVVTPGQVSTPVSTTTSGVKPGTAPSKPPLTKAPVLPVGTELPAGTLPSEQLPPFPGPSLTQSQQPLEDLDAQLRRTLSPEMITVTSAVGPVSMAAPTAITEAGTQPQKGVSQVKEGPVLATSSGAGVFKMGRFQVSVAADGAQKEGKNKSEDAKSVHFESSTSESSVLSSSSPESTLVKPEPNGITIPGISSDVPESAHKTTASEAKSDTGQPTKVGRFQVTTTANKVGRFSVSKTEDKITDTKKEGPVASPPFMDLEQAVLPAVIPKKEKPELSEPSHLNGPSSDPEAAFLSRDVDDGSGSPHSPHQLSSKSLPSQNLSQSLSNSFNSSYMSSDNESDIEDEDLKLELRRLRDKHLKEIQDLQSRQKHEIESLYTKLGKVPPAVIIPPAAPLSGRRRRPTKSKGSKSSRSSSLGNKSPQLSGNLSGQSAASVLHPQQTLHPPGNIPESGQNQLLQPLKPSPSSDNLYSAFTSDGAISVPSLSAPGQGTSSTNTVGATVNSQAAQAQPPAMTSSRKGTFTDDLHKLVDNWARDAMNLSGRRGSKGHMNYEGPGMARKFSAPGQLCISMTSNLGGSAPISAASATSLGHFTKSMCPPQQYGFPATPFGAQWSGTGGPAPQPLGQFQPVGTASLQNFNISNLQKSISNPPGSNLRTT

SEQ ID NO: 14289 - protein, 434 aa, Homo Sapiens
MYELLVLFMLIQPQSMAHPCGGTPTYPESQIFFPTIHERPVSFSPPPTCPPKVAISQRRKSTSFLEAQTHHFQPLLRTVGQSLLPPGGSPTNWTPEAVVMLGTTASRVTGESCEIQVHPMFEPSQVYSDYRPGLVLPEEAHYFIPQEAVYVAGVHYQARVAEQYEGIPYNSSVLSSPMKQIPEQKPVQGGPTSSSVFEFPSGQAFLVGHLQNLRLDSGLGPGSPLSSISAPISTDATRLKFHPVFVPHSAPAVLTHNNESRSNCVFEFHVHTPSSSSGEGGGILPQRVYRNRQVAVDLNQEELPPQSVGLHGYLQPVTEEKHNYHAPELTVSVVEPIGQNWPIGSPEYSSDSSQITSSDPSDFQSPPPTGGAAAPFGSDVSMPFIHLPQTVLQESPLFFCFPQGTTSQQVLTASFSSGGSALHPQVIGKLPQLF

SEQ ID NO: 14290 - protein, 240 aa, Homo Sapiens
PHSAPAVLTHNNESRSNCVFEFHVHTPSSSSGEGGGILPQRVYRNRQVAVDLNQEELPPQSVGLHGYLQPVTEEKHNYHAPELTVSVVEPIGQNWPIGSPEYSSDSSQITSSDPSDFQSPPPTGGAAAPFGSDVSMPFIHLPQTVLQESPLFFCFPQGTTSQQVLTASFSSGGSALHPQAQGQSQGQPSSSSLTGVSSSQPIQHPQQQQGIQQTAPPQQTVQYSLSQTSTSSEATTAQPV

SEQ ID NO: 14291 - protein, 67 aa, Homo Sapiens
SDNLYSAFTSDGAISVPSLSAPGQGCAKFNCASEQVTFKPGGRRTRFLSTPCLALWKMVKKVCPCNQ

SEQ ID NO: 14292 - protein, 245 aa, Homo Sapiens
SQPHGVYPPSSVQGIQQTAPPQQTVQYSLSQTSTSSEATTAQPVSQPQAPQVLPQVSAGKQLPVSQPVPTIQGEPQIPVATQPSVVPVHSGAHFLPVGQPLPTPLLPQYPVSQIPISTPHVSTAQTGFSSLPITMAAGITQPLLTLASSATTAAIPGVSTVVPSQLPTLLQPVTQLPSQVHPQLLQPAVQSMGIPANLGQAAEVPLSSGDVLYQGFPPRLPPQYPGDSNIAPSSNVASVCIHSTV

SEQ ID NO: 14293 - protein, 195 aa, Homo Sapiens [sequence omitted]

SEQ ID NO: 14294 - protein, 218 aa, Homo Sapiens
  misc_feature (1)..(1): Xaa can be any naturally occurring amino acid
XADGTVDSGQGSSVFTESRVSSQQTVSYGSQHEQAHSTGTVPGHIPSTVQAQSQPHGVYPPSSVQQGIQQTAPPQQTVQYSLSQTSTSSEATTAQPVSQPQAPQVLPQVSAGKQSTQGVSQVAPAEPVAVAQTQATQPTTLASSVDSAHSDVASGMSDGNENVPSSSGRHEGRTTKRHYRKSVRSRSRHEKTSRPKLRILNVSNKGDRVVECQLETHN

SEQ ID NO: 14295 - protein, 177 aa, Homo Sapiens
  misc_feature (1)..(1): Xaa can be any naturally occurring amino acid
XEQAHSTGTVPGHIPSTVQAQSQPHGVYPPSSVAQGQSQGQPSSSSLTGVSSSQPIQHPQQQQGIQQTAPPQQTVQYSLSQTSTSSEATTAQPVSQPQAPQVLPQVSAGKQGFPPRLPPQYPGDSNIAPSSNVASVCIHSTVLSPPMPTEVLATPGYFPTVVQPYVESNLLVPMGGV

SEQ ID NO: 14296 - protein, 76 aa, Homo Sapiens
  misc_feature (1)..(1): Xaa can be any naturally occurring amino acid
XSDNLYSAFTSDGAISVPSLSAPGQGKMVKKVCPCNQLCRTSSTNTVGATVNSQAAQAQPPAMTSSRKGTFTDDLH

SEQ ID NO: 14297 - protein, 370 aa, Homo Sapiens
MGLWALLPGWVSATLLLALAALPAALAANSSGRWWGIVNVASSTNLLTDSKSLQLVLEPSLQLLSRKQRRLIRQNPGILHSVSGGLQSAVRECKWQFRNRRWNCPTAPGPHLFGKIVNRGCRETAFIFAITSAGVTHSVARSCSEGSIESCTCDYRRRGPGGPDWHWGGCSDNIDFGRLFGREFVDSGEKGRDLRFLMNLHNNEAGRTTVFSEMRQECKCHGMSGSCTVRTCWMRLPTLRAVGDVLRDRFDGASRVLYGNRGSNRASRAELLRLEPEDPAHKPPSPHDLVYFEKSPNFCTYSGRLGTAGTAGRACNSSSPALDGCELLCCGRGHRTRTQRVTERCNCTFHWCCHVSCRNCTHTRVLHECL

SEQ ID NO: 14298 - protein, 359 aa, Homo Sapiens
MGLWALLPGWVSATLLLALAALPAALAANSSGRWWGIVNVASSTNLLTDSKSLQLVLEPSLQLLSRKQRRLIRQNPGILHSVSGGLQSAVRECKWQFRNRRWNCPTAPGPHLFGKIVNRGCRETAFIFAITSAGVTHSVARSCSEGSIESCTCDYRRRGPGGPDWHWGGCSDNIDFGRLFGREFVDSGEKGRDLRFLMNLHNNEAGRTTVFSEMRQECKCHGMSGSCTVRTCWMRLPTLRAVGDVLRDRFDGASRVLYGNRGSNRASRAELLRLEPDLVYFEKSPNFCTYSGRLGTAGTAGRACNSSSPALDGCELLCCGRGHRTRTQRVTERCNCTFHWCCHVSCRNCTHTRVLHECL

SEQ ID NO: 14299 - protein, 102 aa, Homo Sapiens
MLEEPRPRPPPSGLAGLLFLALCSRALSNEILGLKLPGEPPLTANTVCLTLSGLSKRQLGLCLRNPDVTASALQGLHIAVHECQHQLRDQRWNCSALEGGGR

SEQ ID NO: 14300 - protein, 191 aa, Homo Sapiens
MLEEPRPRPPPSGLAGLLFLALCSRALSNEILGLKLPGEPPLTANTVCLTLSGLSKRQLGLCLRNPDVTASALQGLHIAVHECQHQLRDQRWNCSALEGGGRLPHHSAILKRGFRESAFSFSMLAAGVMHAVATACSLGKLVSCGCGWKGSGEQDRLRAKLLQLQALSRGKLPGTSRHECESTTTGWGARW

SEQ ID NO: 14301 - protein, 389 aa, Homo Sapiens
MLEEPRPRPPPSGLAGLLFLALCSRALSNEILGLKLPGEPPLTANTVCLTLSGLSKRQLGLCLRNPDVTASALQGLHIAVHECQHQLRDQRWNCSALEGGGRLPHHSAILKRGFRESAFSFSMLAAGVMHAVATACSLGKLVSCGCGWKGSGEQDRLRAKLLQLQALSRGKSFPHSLPSPGPGSSPSPGPQDTWEWGGCNHDMDFGEKFSRDFLDSREAPRDIQARMRIHNNRVGRQVVTENLKRKCKCHGTSGSCQFKTCWRAAPEFRAVGAALRERLGRAIFIDTHNRNSGAFQPRLRPRRLSGELVYFEKSPDFCERDPTMGSPGTRGRACNKTSRLLDGCGSLCCGRGHNVLRQTRVERCHCRFHWCCYVLCDECKVTEWVNVCK

SEQ ID NO: 14302 - protein, 173 aa, Homo Sapiens
MLEEPRPRPPPSGLAGLLFLALCSRALSNEILGLKLPGEPPLTANTVCLTLSGLSKRQLGLCLRNPDVTASALQGLHIAVHECQHQLRDQRWNCSALEGGGRLPHHSAILKRGFRESAFSFSMLAAGVMHAVATACSLGKLVSCGCGWKGSGKLPGTSRHECESTTTGWGARW

SEQ ID NO: 14303 - protein, 132 aa, Homo Sapiens
MLEEPRPRPPPSGLAGLLFLALCSRALSNEILGLKLPGEPPLTANTVCLTLSGLSKRQLGLCLRNPDVTASALQGLHIAVHECQHQLRDQRWNCSALEGGGRLPHHSAILKRGPGVGEGLDTQMVSEKVLFP

SEQ ID NO: 14304 - protein, 5 aa, Homo Sapiens
MRARP

SEQ ID NO: 14305 - protein, 354 aa, Homo Sapiens
MRARPQVCEALLFALALQTGVCYGIKWLALSKTPSALALNQTQHCKQLEGLVSAQVQLCRSNLELMHTVVHAAREVMKACRRAFADMRWNCSSIELAPNYLLDLERGTRESAFVYALSAAAISHAIARACTSGDLPGCSCGPVPGEPPGPGNRWGGCADNLSYGLLMGAKFSDAPMKVKKTGSQANKLMRLHNSEVGRQALRASLEMKCKCHGVSGSCSIRTCWKGLQELQDVAADLKTRYLSATKVVHRPMGTRKHLVPKDLDIRPVKDSELVYLQSSPDFCMKNEKVGSHGTQDRQCNKTSNGSDSCDLMCCGRGYNPYTDRVVERCHCKYHWCCYVTCRRCERTVERYVCK

SEQ ID NO: 14306 - protein, 262 aa, Homo Sapiens
MRARPQVCEALLFALALQTGVCYGIKWLALSKTPSALALNQTQHCKQLEGLVSAQVQLCRSNLELMHTVVHAAREVMKACRRAFADMRWNCSSIELAPNYLLDLERGTRESAFVYALSAAAISHAIARACTSGDLQELQDVAADLKTRYLSATKVVHRPMGTRKHLVPKDLDIRPVKDSELVYLQSSPDFCMKNEKVGSHGTQDRQCNKTSNGSDSCDLMCCGRGYNPYTDRVVERCHCKYHWCCYVTCRRCERTVERYVCK

SEQ ID NO: 14307 - protein, 365 aa, Homo Sapiens
MDRAALLGLARLCALWAALLVLFPYGAQGNWMWLGIASFGVPEKLGCANLPLNSRQKELCKRKPYLLPSIREGARLGIQECGSQFRHERWNCMITAAATTAPMGASPLFGYELSSGTKETAFIYAVMAAGLVHSVTRSCSAGNMTECSCDTTLQNGGSASEGWHWGGCSDDVQYGMWFSRKFLDFPIGNTTGKENKVLLAMNLHNNEAGRQAVAKLMSVDCRCHGVSGSCAVKTCWKTMSSFEKIGHLLKDKYENSIQISDKTKRKMRRREKDQRKIPIHKDDLLYVNKSPNYCVEDKKLGIPGTQGRECNRTSEGADGCNLLCCGRGYNTHVVRHVERCECKFIWCCYVRCRRCESMTDVHTCK

SEQ ID NO: 14308 - protein, 355 aa, Homo Sapiens
MQLTTCLRETLFTGASQKTSLWWLGIASFGVPEKLGCANLPLNSRQKELCKRKPYLLPSIREGARLGIQECGSQFRHERWNCMITAAATTAPMGASPLFGYELSSGTKETAFIYAVMAAGLVHSVTRSCSAGNMTECSCDTTLQNGGSASEGWHWGGCSDDVQYGMWFSRKFLDFPIGNTTGKENKVLLAMNLHNNEAGRQAVAKLMSVDCRCHGVSGSCAVKTCWKTMSSFEKIGHLLKDKYENSIQISDKTKRKMRRREKDQRKIPIHKDDLLYVNKSPNYCVEDKKLGIPGTQGRECNRTSEGADGCNLLCCGRGYNTHVVRHVERCECKFIWCCYVRCRRCESMTDVHTCK

SEQ ID NO: 14309 - protein, 110 aa, Homo Sapiens
MNAPLGGIWLWLPLLLTWLTPEVNSSWWYMRATGGSSRVMCDNVPGLVSSQRQLCHRHPDVMRAISQGVAEWTAECQHQFRQHRWNCNTLDRDHSLFGRVLLRRPVAKEK

SEQ ID NO: 14310 - protein, 153 aa, Homo Sapiens
MNAPLGGIWLWLPLLLTWLTPEVNSSWWYMRATGGSSRVMCDNVPGLVSSQRQLCHRHPDVMRAISQGVAEWTAECQHQFRQHRWNCNTLDRDHSLFGRVLLRSCKAVLETRVQVPRGERLMYSQDMLAGHGRLQENGRLSLEEVQWGHPGGH

SEQ ID NO: 14311 - protein, 360 aa, Homo Sapiens
MNAPLGGIWLWLPLLLTWLTPEVNSSWWYMRATGGSSRVMCDNVPGLVSSQRQLCHRHPDVMRAISQGVAEWTAECQHQFRQHRWNCNTLDRDHSLFGRVLLRSSRESAFVYAISSAGVVFAITRACSQGEVKSCSCDPKKMGSAKDSKGIFDWGGCSDNIDYGIKFARAFVDAKERKGKDARALMNLHNNRAGRKAVKRFLKQECKCHGVSGSCTLRTCWLAMADFRKTGDYLWRKYNGAIQVVMNQDGTGFTVANERFKKPTKNDLVYFENSPDYCIRDREAGSLGTAGRVCNLTSRGMDSCEVMCCGRGYDTSHVTRMTKCGCKFHWCCAVRCQDCLEALDVHTCKAPKNADWTTAT

SEQ ID NO: 14312 - protein, 355 aa, Homo Sapiens
MEPHLLGLLLGLLLGGTRVLAGYPIWWSLALGQQYTSLGSQPLLCGSIPGLVPKQLRFCRNYIEIMPSVAEGVKLGIQECQHQFRGRRWNCTTIDDSLAIFGPVLDKATRESAFVHAIASAGVAFAVTRSCAEGTSTICGCDSHHKGPPGEGWKWGGCSEDADFGVLVSREFADARENRPDARSAMNKHNNEAGRTTILDHMHLKCKCHGLSGSCEVKTCWWAQPDFRAIGDFLKDKYDSASEMVVEKHRESRGWVETLRAKYSLFKPPTERDLVYYENSPNFCEPNPETGSFGTRDRTCNVTSHGIDGCDLLCCGRGHNTRTEKRKEKCHCIFHWCCYVSCQECIRIYDVHTCK

SEQ ID NO: 14313 - protein, 352 aa, Homo Sapiens
MAPLGYFLLLCSLKQALGSYPIWWSLAVGPQYSSLGSQPILCASIPGLVPKQLRFCRNYVEIMPSVAEGIKIGIQECQHQFRGRRWNCTTVHDSLAIFGPVLDKATRESAFVHAIASAGVAFAVTRSCAEGTAAICGCSSRHQGSPGKGWKWGGCSEDIEFGGMVSREFADARENRPDARSAMNRHNNEAGRQAIASHMHLKCKCHGLSGSCEVKTCWWSQPDFRAIGDFLKDKYDSASEMVVEKHRESRGWVETLRPRYTYFKVPTERDLVYYEASPNFCEPNPETGSFGTRDRTCNVSSHGIDGCDLLCCGRGHNARAERRREKCRCVFHWCCYVSCQECTRVYDVHTCK

SEQ ID NO: 14314 - protein, 365 aa, Homo Sapiens
MAGSAMSSKFFLVALAIFFSFAQVVIEANSWWSLGMNNPVQMSEVYIIGAQPLCSQLAGLSQGQKKLCHLYQDHMQYIGEGAKTGIKECQYQFRHRRWNCSTVDNTSVFGRVMQIGSRETAFTYAVSAAGVVNAMSRACREGELSTCGCSRAARPKDLPRDWLWGGCGDNIDYGYRFAKEFVDARERERIHAKGSYESARILMNLHNNEAGRRTVYNLADVACKCHGVSGSCSLKTCWLQLADFRKVGDALKEKYDSAAAMRLNSRGKLVQVNSRFNSPTTQDLVYIDPSPDYCVRNESTGSLGTQGRLCNKTSEGMDGCELMCCGRGYDQFKTVQTERCHCKFHWCCYVKCKKCTEIVDQFVCK

SEQ ID NO: 14315 - protein, 214 aa, Homo Sapiens
MAGSAMSSKFFLVALAIFFSFAQVVIEANSWWSLGMNNPVQMSEVYIIGAQPLCSQLAGLSQGQKKLCHLYQDHMQYIGEGAKTGIKECQYQFRHRRWNCSTVDNTSVFGRVMQIGSRETAFTYAVSAAGVVNAMSRACREGELSTCGCSRAARPKDLPRDWLWGGCGDNIDYGYRFAKEFVDARERERIHAKGSYESARILMNLHNNEAGRRV

SEQ ID NO: 14316 - protein, 380 aa, Homo Sapiens
MKKSIGILSPGVALGMAGSAMSSKFFLVALAIFFSFAQVVIEANSWWSLGMNNPVQMSEVYIIGAQPLCSQLAGLSQGQKKLCHLYQDHMQYIGEGAKTGIKECQYQFRHRRWNCSTVDNTSVFGRVMQIGSRETAFTYAVSAAGVVNAMSRACREGELSTCGCSRAARPKDLPRDWLWGGCGDNIDYGYRFAKEFVDARERERIHAKGSYESARILMNLHNNEAGRRTVYNLADVACKCHGVSGSCSLKTCWLQLADFRKVGDALKEKYDSAAAMRLNSRGKLVQVNSRFNSPTTQDLVYIDPSPDYCVRNESTGSLGTQGRLCNKTSEGMDGCELMCCGRGYDQFKTVQTERCHCKFHWCCYVKCKKCTEIVDQFVCK

SEQ ID NO: 14317 - protein, 380 aa, Homo Sapiens; identical to SEQ ID NO: 14316

SEQ ID NO: 14318 - protein, 112 aa, Homo Sapiens
MPSLLLLFTAALLSSWAQLLTDANSWWSLALNPVQRPEMFIIGAQPVCSQLPGLSPGQRKLCQLYQEHMAYIGEGAKTGIKECQHQFRQRRWNCSTADNASVFGRVMQIGCV

SEQ ID NO: 14319 - protein, 118 aa, Homo Sapiens
MPSLLLLFTAALLSSWAQLLTDANSWWSLALNPVQRPEMFIIGAQPVCSQLPGLSPGQRKLCQLYQEHMAYIGEGAKTGIKECQHQFRQRRWNCSTADNASVFGRVMQIGSRETAFTH

SEQ ID NO: 14320 - protein, 157 aa, Homo Sapiens
MPSLLLLFTAALLSSWAQLLTDANSWWSLALNPVQRPEMFIIGAQPVCSQLPGLSPGQRKLCQLYQEHMAYIGEGAKTGIKECQHQFRQRRWNCSTADNASVFGRVMQIGSRETAFTHAVSAAGVVNAISRACREGELSTCGCSRTARPKDLPRDWL

SEQ ID NO: 14321 - protein, 254 aa, Homo Sapiens
MPSLLLLFTAALLSSWAQLLTDANSWWSLALNPVQRPEMFIIGAQPVCSQLPGLSPGQRKLCQLYQEHMAYIGEGAKTGIKECQHQFRQRRWNCSTADNASVFGRVMQIGSRETAFTHAVSAAGVVNAISRACREGELSTCGCSRTARPKDLPRDWLWGGCGDNVEYGYRFAKEFVDAREREKNFAKGSEEQGRVLMNLQNNEAGRRAVYKMADVACKCHGVSGSCSLKTCWLQLAEFRKVGDRLKEKYDSAAA

SEQ ID NO: 14322 - protein, 359 aa, Homo Sapiens
MPSLLLLFTAALLSSWAQLLTDANSWWSLALNPVQRPEMFIIGAQPVCSQLPGLSPGQRKLCQLYQEHMAYIGEGAKTGIKECQHQFRQRRWNCSTADNASVFGRVMQIGSRETAFTHAVSAAGVVNAISRACREGELSTCGCSRTARPKDLPRDWLWGGCGDNVEYGYRFAKEFVDAREREKNFAKGSEEQGRVLMNLQNNEAGRRAVYKMADVACKCHGVSGSCSLKTCWLQLAEFRKVGDRLKEKYDSAAAMRVTRKGRLELVNSRFTQPTPEDLVYVDPSPDYCLRNESTGSLGTQGRLCNKTSEGMDGCELMCCGRGYNQFKSVQVERCHCKFHWCCFVRCKKCTEIVDQYICK

SEQ ID NO: 14323 - protein, 359 aa, Homo Sapiens; identical to SEQ ID NO: 14322

SEQ ID NO: 14324 - protein, 359 aa, Homo Sapiens; identical to SEQ ID NO: 14322

SEQ ID NO: 14325 - protein, 365 aa, Homo Sapiens
MLPPLPSRLGLLLLLLLCPAHVGGLWWAVGSPLVMDPTSICRKARRLAGRQAELCQAEPEVVAELARGARLGVRECQFQFRFRRWNCSSHSKAFGRILQQDIRETAFVFAITAAGASHAVTQACSMGELLQCGCQAPRGRAPPRPSGLPGTPGPPGPAGSPEGSAAWEWGGCGDDVDFGDEKSRLFMDARHKRGRGDIRALVQLHNNEAGRLAVRSHTRTECKCHGLSGSCALRTCWQKLPPFREVGARLLERFHGASRVMGTNDGKALLPAVRTLKPPGRADLLYAADSPDFCAPNRRTGSPGTRGRACNSSAPDLSGCDLLCCGRGHRQESVQLEENCLCRFHWCCVVQCHRCRVRKELSLCL

SEQ ID NO: 14326 - protein, 349 aa, Homo Sapiens
MNRKARRCLGHLFLSLGMVYLRIGGFSSVVALGASIICNKIPGLAPRQRAICQSRPDAIIVIGEGSQMGLDECQFQFRNGRWNCSALGERTVFGKELKVGSREAAFTYAIIAAGVAHAITAACTQGNLSDCGCDKEKQGQYHRDEGWKWGGCSADIRYGIGFAKVFVDAREIKQNARTLMNLHNNEAGRKILEENMKLECKCHGVSGSCTTKTCWTTLPQFRELGYVLKDKYNEAVHVEPVRASRNKRPTFLKIKKPLSYRKPMDTDLVYIEKSPNYCEEDPVTGSVGTQGRACNKTAPQASGCDLMCCGRGYNTHQYARVWQCNCKFHWCCYVKCNTCSERTEMYTCK

SEQ ID NO: 14327 - protein, 57 aa, Homo Sapiens
MGINECQYQFRFGRWNCSALGEKTVFGQELRVGSREAAFTYAITAAGVAHAVTAACS

SEQ ID NO: 14328 - protein, 205 aa, Homo Sapiens
MHRNFRKWIFYVFLCFGVLYVKLGALSSVVALGANIICNKIPGLAPRQRAICQSRPDAIIVIGEGAQMGINECQYQFRFGRWNCSALGEKTVFGQELRVGSREAAFTYAITAAGVAHAVTAACSQGNLSNCGCDREKQGYYNQAEGWKWGGCSADVRYGIDFSRRFVDAREIKKNARRLMNLHNNEAGRKGLLGQPRVTSSPLFP

SEQ ID NO: 14329 - protein, 349 aa, Homo Sapiens
MHRNFRKWIFYVFLCFGVLYVKLGALSSVVALGANIICNKIPGLAPRQRAICQSRPDAIIVIGEGAQMGINECQYQFRFGRWNCSALGEKTVFGQELRVGSREAAFTYAITAAGVAHAVTAACSQGNLSNCGCDREKQGYYNQAEGWKWGGCSADVRYGIDFSRRFVDAREIKKNARRLMNLHNNEAGRKVLEDRMQLECKCHGVSGSCTTKTCWTTLPKFREVGHLLKEKYNAAVQVEVVRASRLRQPTFLRIKQLRSYQKPMETDLVYIEKSPNYCEEDAATGSVGTQGRLCNRTSPGADGCDTMCCGRGYNTHQYTKVWQCNCKFHWCCFVKCNTCSERTEVFTCK

SEQ ID NO: 14330 - protein, 353 aa, Homo Sapiens
MLLLSPRSALVSVYCPQIFLLLSSGSYLALSSVVALGANIICNKIPGLAPRQRAICQSRPDAIIVIGEGAQMGINECQYQFRFGRWNCSALGEKTVFGQELRVGSREAAFTYAITAAGVAHAVTAACSQGNLSNCGCDREKQGYYNQAEGWKWGGCSADVRYGIDFSRRFVDAREIKKNARRLMNLHNNEAGRKVLEDRMQLECKCHGVSGSCTTKTCWTTLPKFREVGHLLKEKYNAAVQVEVVRASRLRQPTFLRIKQLRSYQKPMETDLVYIEKSPNYCEEDAATGSVGTQGRLCNRTSPGADGCDTMCCGRGYNTHQYTKVWQCNCKFHWCCFVKCNTCSERTEVFTCK

SEQ ID NO: 14331 - protein, 333 aa, Homo Sapiens
MSAPPFYRALSSVVALGANIICNKIPGLAPRQRAICQSRPDAIIVIGEGAQMGINECQYQFRFGRWNCSALGEKTVFGQELRVGSREAAFTYAITAAGVAHAVTAACSQGNLSNCGCDREKQGYYNQAEGWKWGGCSADVRYGIDFSRRFVDAREIKKNARRLMNLHNNEAGRKVLEDRMQLECKCHGVSGSCTTKTCWTTLPKFREVGHLLKEKYNAAVQVEVVRASRLRQPTFLRIKQLRSYQKPMETDLVYIEKSPNYCEEDAATGSVGTQGRLCNRTSPGADGCDTMCCGRGYNTHQYTKVWQCNCKFHWCCFVKCNTCSERTEVFTCK

SEQ ID NO: 14332 - protein, 355 aa, Homo Sapiens
MGNLFMLWAALGICCAAFSASAWSVNNFLITGPKAYLTYTTSVALGAQSGIEECKFQFAWERWNCPENALQLSTHNRLRSATRETSFIHAISSAGVMYIITKNCSMGDFENCGCDGSNNGKTGGHGWIWGGCSDNVEFGERISKLFVDSLEKGKDARALMNLHNNRAGRLAVRATMKRTCKCHGISGSCSIQTCWLQLAEFREMGDYLKAKYDQALKIEMDKRQLRAGNSAEGHWVPAEAFLPSAEAELIFLEESPDYCTCNSSLGIYGTEGRECLQNSHNTSRWERRSCGRLCTECGLQVEERKTEVISSCNCKFQWCCTVKCDQCRHVVSKYYCARSPGSAQSLGRVWFGVYI

SEQ ID NO: 14333 - protein, 351 aa, Homo Sapiens
MGNLFMLWAALGICCAAFSASAWSVNNFLITGPKAYLTYTTSVALGAQSGIEECKFQFAWERWNCPENALQLSTHNRLRSATRETSFIHAISSAGVMYIITKNCSMGDFENCGCDGSNNGKTGGHGWIWGGCSDNVEFGERISKLFVDSLEKGKDARALMNLHNNRAGRLAVRATMKRTCKCHGISGSCSIQTCWLQLAEFREMGDYLKAKYDQALKIEMDKRQLRAGNSAEGHWVPAEAFLPSAEAELIFLEESPDYCTCNSSLGIYGTEGRECLQNSHNTSRWERRSCGRLCTECGLQVEERKTEVISSCNCKFQWCCTVKCDQCRHVVSKYYCARSPGSAQSLGKGSA

SEQ ID NO: 14334 - protein, 369 aa, Homo Sapiens
MLCCIQCLCLVSPFPTLTPCQGGPHCLIPIHLCLTFSLFGRSVNNFLITGPKAYLTYTTSVALGAQSGIEECKFQFAWERWNCPENALQLSTHNRLRSATRETSFIHAISSAGVMYIITKNCSMGDFENCGCDGSNNGKTGGHGWIWGGCSDNVEFGERISKLFVDSLEKGKDARALMNLHNNRAGRLAVRATMKRTCKCHGISGSCSIQTCWLQLAEFREMGDYLKAKYDQALKIEMDKRQLRAGNSAEGHWVPAEAFLPSAEAELIFLEESPDYCTCNSSLGIYGTEGRECLQNSHNTSRWERRSCGRLCTECGLQVEERKTEVISSCNCKFQWCCTVKCDQCRHVVSKYYCARSPGSAQSLGKGSA

SEQ ID NO: 14335 - protein, 360 aa, Homo Sapiens
MLCCIQCLCLVSPFPTLTPCQGGPHCLIPIHLCLTFSLFGRSVNNFLITGPKAYLTYTTSVALGAQSGIEECKFQFAWERWNCPENALQLSTHNRLRSATRETSFIHAISSAGVMYIITKNCSMGDFENCGCDGSNNGKTGGHGWIWGGCSDNVEFGERISKLFVDSLEKGKDARALMNLHNNRAGRLAVRATMKRTCKCHGISGSCSIQTCWLQLAEFREMGDYLKAKYDQALKIEMDKRQLRAGNSAEGHWVPAEAFLPSAEAELIFLEESPDYCTCNSSLGIYGTEGRECLQNSHNTSRWERRSCGRLCTECGLQVEERKTEVISSCNCKFQWCCTVKCDQCRHVTMSNPAVLLGIR

SEQ ID NO: 14336 - protein, 351 aa, Homo Sapiens
MFLSKPSVYICLFTCVLQLSHSWSVNNFLMTGPKAYLIYSSSVAAGAQSGIEECKYQFAWDRWNCPERALQLSSHGGLRSANRETAFVHAISSAGVMYTLTRNCSLGDFDNCGCDDSRNGQLGGQGWLWGGCSDNVGFGEAISKQFVDALETGQDARAAMNLHNNEAGRKAVKGTMKRTCKCHGVSGSCTTQTCWLQLPEFREVGAHLKEKYHAALKVDLLQGAGNSAAGRGAIADTFRSISTRELVHLEDSPDYCLENKTLGLLGTEGRECLRRGRALGRWERRSCRRLCGDCGLAVEERRAETVSSCNCKFHWCCAVRCEQCRRRVTKYFCSRAERPRGGAAHKPGRKP

SEQ ID NO: 14337 - protein, 365 aa, Homo Sapiens
MLDGSPLARWLAAAFGLTLLLAALRPSAAYFGLTGSEPLTILPLTLEPEAAAQAHYKACDRLKLERKQRRMCRRDPGVAETLVEAVSMSALECQFQFRFERWNCTLEGRYRASLLKRGFKETAFLYAISSAGLTHALAKACSAGRMERCTCDEAPDLENREAWQWGGCGDNLKYSSKFVKEFLGRRSSKDLRARVDFHNNLVGVKVIKAGVETTCKCHGVSGSCTVRTCWRQLAPFHEVGKHLKHKYETALKVGSTTNEAAGEAGAISPPRGRASGAGGSDPLPRTPELVHLDDSPSFCLAGRFSPGTAGRRCHREKNCESICCGRGHNTQSRVVTRPCQCQVRWCCYVECRQCTQREEVYTCKG

SEQ ID NO: 14338 - protein, 133 aa, Homo Sapiens
MKGRAVSFDPLACQGLNASPGSLTSPLRRIRSLTGREVLTPFPGLGTAAAPAQGGAHLKQCDLLKLSRRQKQLCRREPGLAETLRDAAHLGLLECQFQFRHERWNCSLEGRMGLLKRGFKETAFLYAVSSAAL

SEQ ID NO: 14339 - protein, 357 aa, Homo Sapiens
MRPPPALALAGLCLLALPAAAASYFGLTGREVLTPFPGLGTAAAPAQGGAHLKQCDLLKLSRRQKQLCRREPGLAETLRDAAHLGLLECQFQFRHERWNCSLEGRMGLLKRGFKETAFLYAVSSAALTHTLARACSAGRMERCTCDDSPGLESRQAWQWGVCGDNLKYSTKFLSNFLGSKRGNKDLRARADAHNTHVGIKAVKSGLRTTCKCHGVSGSCAVRTCWKQLSPFRETGQVLKLRYDSAVKVSSATNEALGRLELWAPARQGSLTKGLAPRSGDLVYMEDSPSFCRPSKYSPGTAGRVCSREASCSSLCCGRGYDTQSRLVAFSCHCQVQWCCYVECQQCVQEELVYTCKH

SEQ ID NO: 14340 - protein, 329 aa, Homo Sapiens
MRPPPALALAGLCLLALPAAAASYFGLTGREVLTPFPGLGTAAAPAQGGAHLKQCDLLKLSRRQKQLCRREPGLAETLRDAAHLGLLECQFQFRHERWNCSLEGRMGLLKRGFKETAFLYAVSSAALTHTLARACSAGRMERCTCDDSPGLESRQAWQWGVCGDNLKYSTKFLSNFLGSKRGNKDLRARADAHNTHVGIKAVKSGLRTTCKCHGVSGSCAVRTCWKQLSPFRETGQVLKLRYDSAVKVSSATNEALGRLELWAPARQGSLTKGLAPRSGDLVYMEDSPSFCRPSKYSPGTAGWSAVARSQLITTSTSRIQAILPSQLPE

SEQ ID NO: 14341 - protein, 78 aa, Homo Sapiens
MASFPPRVNEKEIAPAAPFDKKCGRENWTVAFAPDGSYFAWSQGHRTVKLVPWSQCLQNFLLHGTKNVTNSSSLRLPR

SEQ ID NO: 14342 - protein, 213 aa, Homo Sapiens
MASFPPRVNEKEIDGSYFAWSQGHRTVKLVPWSQCLQNFLLHGTKNVTNSSSLRLPRQNSDGGQKNKPREHIIDCGDIVWSLAFGSSVPEKQSRCVNIEWHRFRFGQDQLLLATGLNNGRIKIWDVYTGKLLLNLVDHTEVVRDLTFAPDGSLILVSASRDKTLRVWDLKDDGNMMKVLRGHQNWVYSCAFSPDSSMLCSVGASKAVVAAILV

SEQ ID NO: 14343 - protein, 143 aa, Homo Sapiens
MASFPPRVNEKEIGKLLLNLVDHTEVVRDLTFAPDGSLILVSASRDKTLRVWDLKDDGNMMKVLRGHQNWVYSCAFSPDSSMLCSVGASKAVFLWNMDKYTMIRKLEGHHHDVVACDFSPDGALLATASYDTRVYIWDPHNGD

SEQ ID NO: 14344 - protein, 275 aa, Homo Sapiens
MASFPPRVNEKEIGKLLLNLVDHTEVVRDLTFAPDGSLILVSASRDKTLRVWDLKDDGNMMKVLRGHQNWVYSCAFSPDSSMLCSVGASKAVFLWNMDKYTMIRKLEGHHHDVVACDFSPDGALLATASYDTRVYIWDPHNGDILMEFGHLFPPPTPIFAGGANDRWVRSVSFSHDGLHVASLADDKMVRFWRIDEDYPVQVAPLSNGLCCAFSTDGSVLAAGTHDGSVYFWATPRQVPSLQHLCRMSIRRVMPTQEVQELPIPSKLLEFLSYRI

SEQ ID NO: 14345 - protein, 98 aa, Homo Sapiens
MASFPPRVNEKEIGKLLLNLVDHTEVVRDLTFAPDGSLILVSASRDKTLRVWDLKDDGNMMKVLRGHQNWVYSCAFSPDSSMLCSVGASKAVVAAILV

SEQ ID NO: 14346 - protein, 54 aa, Homo Sapiens
MASFPPRVNEKEIGNMMKVLRGHQNWVYSCAFSPDSSMLCSVGASKAVVAAILV

SEQ ID NO: 14347 - protein, 207 aa, Homo Sapiens
MASFPPRVNEKEIVFLFFLLVRLRTIGELLAPAAPFDKKCGRENWTVAFAPDGSYFAWSQGHRTVKLVPWSQCLQNFLLHGTKNVTNSSSLRLPRQNSDGGQKNKPREHIIDCGDIVWSLAFGSSVPEKQSRCVNIEWHRFRFGQDQLLLATGLNNGRIKIWDVYTGKLLLNLVDHTEVVRDLTFAPDGSLILVSASRDKTLRVWDL

SEQ ID NO: 14348 - protein, 421 aa, Homo Sapiens
MASFPPRVNEKEIVRLRTIGELLAPAAPFDKKCGRENWTVAFAPDGSYFAWSQGHRTVKLVPWSQCLQNFLLHGTKNVTNSSSLRLPRQNSDGGQKNKPREHIIDCGDIVWSLAFGSSVPEKQSRCVNIEWHRFRFGQDQLLLATGLNNGRIKIWDVYTGKLLLNLVDHTEVVRDLTFAPDGSLILVSASRDKTLRVWDLKDDGNMMKVLRGHQNWVYSCAFSPDSSMLCSVGASKAVFLWNMDKYTMIRKLEGHHHDVVACDFSPDGALLATASYDTRVYIWDPHNGDILMEFGHLFPPPTPIFAGGANDRWVRSVSFSHDGLHVASLADDKMVRFWRIDEDYPVQVAPLSNGLCCAFSTDGSVLAAGTHDGSVYFWATPRQVPSLQHLCRMSIRRVMPTQEVQELPIPSKLLEFLSYRI

SEQ ID NO: 14349 - protein, 247 aa, Homo Sapiens
MASFPPRVNEKEIVRLRTIGELLAPAAPFDKKCGRENWTVAFAPDGSYFAWSQGHRTVKLVPWSQCLQNFLLHGTKNVTNSSSLRLPRQNSDGGQKNKPREHIIDCGDIVWSLAFGSSVPEKQSRCVNIEWHRFRFGQDQLLLATGLNNGRIKIWDVYTGKLLLNLVDHTEVVRDLTFAPDGSLILVSASRDKTLRVWDLKDDGNMMKVLRGHQNWVYSCAFSPDSSMLCSVGASKAVRVKVLVHSL

SEQ ID NO: 14350 - protein, 74 aa, Homo Sapiens
MASFPPRVNEKEIVRLRTIGELLAPAAPFDKKCGRENWTVAFAPDGSYFAWSQGHRTVKLVPWSQCLQNLKTPP

SEQ ID NO: 14351 - protein, 459 aa, Homo Sapiens
MAEQGRCCDLAALGEQGGAPPWEKSLGTYIGCFSDDGHERTLKGAVFYDLRKMTVSHCQDACAERSYVYAGLEAGAECYCGNRLPAVSVGLEECNHECKGEKGSVCGAVDRLSVYRVDELQPGSRKRRTATYRGCFRLPENITHAFPSSLIQANVTVGTCSGFCSQKEFPLAILRGWECYCAYPTPRFNLRDAMDSSVCGQDPEAQRLAEYCEVYQTPVQDTRCTDRRFLPNKSKVFVALSSFPGAGNTWARHLIEHATGFYTGSYYFDGTLYNKGFKGEKDHWRSRRTICVKTHESGRREIEMFDSAILLIRNPYRSLVAEFNRKCAGHLGYAADRNWKSKEWPDFVNSYASWWSSHVLDWLKYGKRLLVVHYEELRRSLVPTLREMVAFLNVSVSEERLLCVENNKEGSFRRRGRRSHDPEPFTPEMKDLINGYIRTVDQALRDHNWTGLPREYVPR

SEQ ID NO: 14352 - protein, 45 aa, Homo Sapiens
MAKPFFRLQKFLRRTQFLLFFLTAAYLMTGSLLLLQRVRVALPQG

SEQ ID NO: 14353 - protein, 87 aa, Homo Sapiens
MAKPFFRLQKFLRRTQFLLFFLTAAYLMTGSLLLLQRVRVALPQGPRAPGPLQTLPVAAVALGVGLLDSRALHDPRVSPELLLGVDM

SEQ ID NO: 14354 - protein, 181 aa, Homo Sapiens
MAKPFFRLQKFLRRTQFLLFFLTAAYLMTGSLLLLQRVRVALPQGPRAPGPLQTLPVAAVALGVGLLDSRALHDPRVSPELLLGVDMLQSPLTRPRPGPRWLRSRNSELRQLRRRWFHHFMSDSQGPPALGPEAARPAIHSRGTYIGCFSDDGHERTLKGAVFYDLRKMTVSHCQDACAER

SEQ ID NO: 14355 - protein, 575 aa, Homo Sapiens
MAKPFFRLQKFLRRTQFLLFFLTAAYLMTGSLLLLQRVRVALPQGPRAPGPLQTLPVAAVALGVGLLDSRALHDPRVSPELLLGVDMLQSPLTRPRPGPRWLRSRNSELRQLRRRWFHHFMSDSQGPPALGPEAARPAIHSRGTYIGCFSDDGHERTLKGAVFYDLRKMTVSHCQDACAERSYVYAGLEAGAECYCGNRLPAVSVGLEECNHECKGEKGSVCGAVDRLSVYRVDELQPGSRKRRTATYRGCFRLPENITHAFPSSLIQANVTVGTCSGFCSQKEFPLAILRGWECYCAYPTPRFNLRDAMDSSVCGQDPEAQRLAEYCEVYQTPVQDTRCTDRRFLPNKSKVFVALSSFPGAGNTWARHLIEHATGFYTGSYYFDGTLYNKGFKGEKDHWRSRRTICVKTHESGRREIEMFDSAILLIRNPYRSLVAEFNRKCAGHLGYAADRNWKSKEWPDFVNSYASWWSSHVLDWLKYGKRLLVVHYEELRRSLVPTLREMVAFLNVSVSEERLLCVENNKEGSFRRRGRRSHDPEPFTPEMKDLINGYIRTVDQALRDHNWTGLPREYVPR

SEQ ID NO: 14356 - protein, 575 aa, Homo Sapiens; identical to SEQ ID NO: 14355

SEQ ID NO: 14357 - protein, 575 aa, Homo Sapiens; identical to SEQ ID NO: 14355

SEQ ID NO: 14358 - protein, 575 aa, Homo Sapiens; identical to SEQ ID NO: 14355

SEQ ID NO: 14359 - protein, 26 aa, Homo Sapiens
MTVSHCQDACAERSYVYAGLEAGAEC

SEQ ID NO: 14360 - protein, 136 aa, Homo Sapiens
  misc_feature (1)..(1): Xaa can be any naturally occurring amino acid
XGSLLLLQRVRVALPQGPRAPGPLQTLPVAAVALGVGLLDSRALHDPRVSPELLLGVDMLQSPLTRPRPGPRWLRSRNSELRQLRRRWFHHFMSDSQGPPALGPEAARPAIHSRGPMSTPAWRPGRSVTAGTGCQR

SEQ ID NO: 14361 - protein, 565 aa, Homo Sapiens
MAKLWFKFQRYFRRKPVRFFTFLALYLTAGSLVFLHSGFVGQPAVSGNQANPAAAGGPAEGAELSFLGDMHLGRGFRDTGEASSIARRYGPWFKGKDGNERAKLGDYGGAWSRALKGRVVREKEEERAKYIGCYLDDTQSRALRGVSFFDYKKMTIFRCQDNCAERGYLYGGLEFGAECYCGHKIQATNVSEAECDMECKGERGSVCGGANRLSVYRLQLAQESARRYGSAVFRGCFRRPDNLSLALPVTAAMLNMSVDKCVDFCTEKEYPLAALAGTACHCGFPTTRFPLHDREDEQLCAQKCSAEEFESCGTPSYFIVYQTQVQDNRCMDRRFLPGKSKQLIALASFPGAGNTWARHLIELATGFYTGSYYFDGSLYNKGFKGERDHWRSGRTICIKTHESGQKEIEAFDAAILLIRNPYKALMAEFNRKYGGHIGFAAHAHWKGKEWPEFVRNYAPWWATHTLDWLKFGKKVLVVHFEDLKQDLFVQLGRMVSLLGVAVREDRLLCVESQKDGNFKRSGLRKLEYDPYTADMQKTISAYIKMVDAALKGRNLTGVPDDYYPR

SEQ ID NO: 14362 - protein, 565 aa, Homo Sapiens; identical to SEQ ID NO: 14361

SEQ ID NO: 14363 - protein, 585 aa, Homo Sapiens
MAKLWFKFQRYFRRKPVRFFTFLALYLTAGSLVFLHSGFVGQPAVSGNQANPAAAGGPAEGAELSFLGDMHLGRGFRDTGEASSIARRYGPWFKGKDGNERAKLGDYGGAWSRALKGRVVREKEEERAKYIGCYLDDTQSRALRGVSFFDYKKMTIFRCQDNCAERGYLYGGLEFGAECYCGHKIQATNVSEAECDMECKGERGSVCGGANRLSVYRLQLAQESARRYGSAVFRGCFRRPDNLSLALPVTAAMLNMSVDKCVDFCTEKEYPLAALAGTACHCGFPTTRFPLHDREDEQLCAQKCSAEEFESCGTPSYFIVYQTQVQDNRCMDRRFLPGKSKQLIALASFPGAGNTWARHLIELATGFYTGSYYFDGSLYNKGFKGERDHWRSGRTICIKTHESGQKEIEAFDAAILLIRNPYKALMAEFNRKYGGHIGFAAHAHWKGKGAVPGSLQILFRSICTASVGEWPEFVRNYAPWWATHTLDWLKFGKKVLVVHFEDLKQDLFVQLGRMVSLLGVAVREDRLLCVESQKDGNFKRSGLRKLEYDPYTADMQKTISAYIKMVDAALKGRNLTGVPDDYYPR

SEQ ID NO: 14364 - protein, 124 aa, Homo Sapiens
MTIFRCQDNCAERGYLYGGLEFGAECYCGHKIQATNVSEAECDMECKGERGSVCGGANRLSVYRLQLAQESARRYGSAVFRGCFRRPDNLSLALPVTAAMLNMSVDKCVDFCTEKEYPLAALAG

SEQ ID NO: 14365 - protein, 114 aa, Homo Sapiens
MRLLILALLGICSLTAYIVEGVGSEVSDKRTCVSLTTQRLPVSRIKTYTITEGSLRAVIFITKRGLKVCADPQATWVRDVVRSMDRKSNTRNNMIQTKPTGTQQSTNTAVTLTG

SEQ ID NO: 14366 - protein, 114 aa, Homo Sapiens
MRLLILALLGICSLTAYIVEGVGSEVSHRRTCVSLTTQRLPVSRIKTYTITEGSLRAVIFITKRGLKVCADPQATWVRDVVRSMDRKSNTRNNMIQTKPTGTQQSTNTAVTLTG

SEQ ID NO: 14367 - protein, 674 aa, Homo Sapiens
MARAHWGCCPWLVLLCACAWGHTKPVDLGGQDVRNCSTNPPYLPVTVVNTTMSLTALRQQMQTQNLSAYIIPGTDAHMNEYIGQHDERRAWITGFTGSAGTAVVTMKKAAVWTDSRYWTQAERQMDCNWELHKEVGTTPIVTWLLTEIPAGGRVGFDPFLLSIDTWESYDLALQGSNRQLVSITTNLVDLVWGSERPPVPNQPIYALQEAFTGSTWQEKVSGVRSQMQKHQKVPTAVLLSALEETAWLFNLRASDIPYNPFFYSYTLLTDSSIRLFANKSRFSSETLSYLNSSCTGPMCVQIEDYSQVRDSIQAYSLGDVRIWIGTSYTMYGIYEMIPKEKLVTDTYSPVMMTKAVKNSKEQALLKASHVRDAVAVIRYLVWLEKNVPKGTVDEFSGAEIVDKFRGEEQFSSGPSFETISASGLNAALAHYSPTKELNRKLSSDEMYLLDSGGQYWDGTTDITRTVHWGTPSAFQKEAYTRVLIGNIDLSRLIFPAATSGRMVEAFARRALWDAGLNYGHGTGHGIGNFLCVHEWPVGFQSNNIAMAKGMFTSIEPGYYKDGEFGIRLEDVALVVEAKTKYPGSYLTFEVVSFVPYDRNLIDVSLLSPEHLQYLNRYYQTIREKVGPELQRRQLLEEFEWLQQHTEPLAARAPDTASWASVLVVSTLAILGWSV

SEQ ID NO: 14368 - protein, 183 aa, Homo Sapiens
MARAHWGCCPWLVLLCACAWGHTKPVDLGGQDVRNCSTNPPYLPVTVVNTTMSLTALRQQMQTQNLSAYIIPGTDAHMNEYIGQHDERRAWITGFTGSAGTAVVTMKKAAVWTDSRYWTQAERQMDCNWELHKEVGTTPIVTWLLTEIPAGGRVGFDPFLLSIGMLFLQSLNLSMLTRVTQLP

SEQ ID NO: 14369 - protein, 393 aa, Homo Sapiens
MGLLRGGLPCARAMARLGAVRSHYCALLLAAALAVCAFYYLGSGRETFSSATKRLKEARAGAPAAPSPPALELARGSVAPAPGAKAKSLEGGGAGPVDYHLLMMFTKAEHNAALQAKARVALRSLLRLAKFEAHEVLNLHFVSEEASREVAKGLLRELLPPAAGFKCKVIFHDVAVLTDKLFPIVEAMQKHFSAGLGTYYSDSIFFLSVAMHQIMPKEILQIIQLDLDLKFKTNIRELFEEFDSFLPGAIIGIAREMQPVYRHTFWQFRHENPQTRVGGPPPEGLPGFNSGVMLLNLEAMRQSPLYSRLLEPAQVQQLADKYHFRGHLGDQDFFTMIGMEHPKLFHVLDCTWNRQLCTWWRDHGYSDVFEAYFRCEGHVKIYHGNCNTPIPED

SEQ ID NO: 14370 - protein, 187 aa, Homo Sapiens
MNGMSVLMKETLKSSVTPSPYEETGERQPSVNWAVSPHQTQNQWARWSWTSQPLELHTFWQFRHENPQTRVGGPPPEGLPGFNSGVMLLNLEAMRQSPLYSRLLEPAQVQQLADKYHFRGHLGDQDFFTMIGMEHPKLFHVLDCTWNRQLCTWWRDHGYSDVFEAYFRCEGHVKIYHGNCNTPIPED

SEQ ID NO: 14371 - protein, 84 aa, Homo Sapiens
MVRCVPSAVIVCFLRPPQPGRTVIFHDVAVLTDKLFPIVEAMQKHFSAGLGTYYSDSIFFLSVAMHQIMPKECTPLVQGRTSCT

SEQ ID NO: 14372 - protein, 247 aa, Homo Sapiens
MVRCVPSAVIVCFLRPPQPGRTVIFHDVAVLTDKLFPIVEAMQKHFSAGLGTYYSDSIFFLSVAMHQIMPKEILQIIQLDLDLKFKTNIRELFEEFDSFLPGAIIGIAREMQPVYRHTFWQFRHENPQTRVGGPPPEGLPGFNSGVMLLNLEAMRQSPLYSRLLEPAQVQQLADKYHFRGHLGDQDFFTMIGMEHPKLFHVLDCTWNRQLCTWWRDHGYSDVFEAYFRCEGHVKIYHGNCNTPIPED

SEQ ID NO: 14373 - protein, 190 aa, Homo Sapiens
MWPPRCKDPGRQSAEILQIIQLDLDLKFKTNIRELFEEFDSFLPGAIIGIAREMQPVYRHTFWQFRHENPQTRVGGPPPEGLPGFNSGVMLLNLEAMRQSPLYSRLLEPAQVQQLADKYHFRGHLGDQDFFTMIGMEHPKLFHVLDCTWNRQLCTWWRDHGYSDVFEAYFRCEGHVKIYHGNCNTPIPED

SEQ ID NO: 14374 - protein, 114 aa, Homo Sapiens
  misc_feature (1)..(1): Xaa can be any naturally occurring amino acid
XSPPALELARGSVAPAPGAKAKSLEGGGAGPVDYHLLMMFTKAEHNAALQAKARVALRSLLRLAKFEAHEVLNLHFVSEEASREVAKGLLRELLPPAAGFKCKFLTSEDGTGHQ

SEQ ID NO: 14375 - protein, 959 aa, Homo Sapiens
MVAAPCARRLARRSHSALLAALTVLLLQTLVVWNFSSLDSGAGERRGGAAVGGGEQPPPAPAPRRERRDLPAEPAAARGGGGGGGGGGGGRGPQARARGGGPGEPRGQQPASRGALPARALDPHPSPLITLETQDGYFSHRPKEKVRTDSNNENSVPKDFENVDNSNFAPRTQKQKHQPELAKKPPSRQKELLKRKLEQQEKGKGHTFPGKGPGEVLPPGDRAAANSSHGKDVSRPPHARKTGGSSPETKYDQPPKCDISGKEAISALSRAKSKHCRQEIGETYCRHKLGLLMPEKVTRFCPLEGKANKNVQWDEDSVEYMPANPVRIAFVLVVHGRASRQLQRMFKAIYHKDHFYYIHVDKRSNYLHRQVLQVSRQYSNVRVTPWRMATIWGGASLLSTYLQSMRDLLEMTDWPWDFFINLSAADYPIRTNDQLVAFLSRYRDMNFLKSHGRDNARFIRKQGLDRLFLECDAHMWRLGDRRIPEGIAVDGGSDWFLLNRRFVEYVTFSTDDLVTKMKQFYSYTLLPAESFFHTVLENSPHCDTMVDNNLRITNWNRKLGCKCQYKHIVDWCGCSPNDFKPQDFHRFQQTARPTFFARKFEAVVNQEIIGQLDYYLYGNYPAGTPGLRSYWENVYDEPDGIHSLSDVTLTLYHSFARLGLRRAETSLHTDGENSCRYYPMGHPASVHLYFLADRFQGFLIKHHATNLAVSKLETLETWVMPKKVFKIASPPSDFGRLQFSEVGTDWDAKERLFRNFGGLLGPMDEPVGMQKWGKGPNVTVTVIWVDPVNVIAATYDILIESTAEFTHYKPPLNLPLRPGVWTVKILHHWVPVAETKFLVAPLTFSNRQPIKPEEALKLHNGPLRNAYMEQSFQSLNPVLSLPINPAQVEQARRNAASTGTALEGWLDSLVGGMWTAMDICATGPTACPVMQTCSQTAWSSFSPDPKSELGAVKPDGRLR

SEQ ID NO: 14376 - protein, 117 aa, Homo Sapiens
CQYKHIVDWCGCSPNDFKPQDFLRLQQVSRPTFFARKFESTVNQEVLEILDFHLYGSYPPGTPALKAYWENTYDAADGPSGLSDVMLTAYTAFARLSLHHAATAAPPMGTPLCRATW

SEQ ID NO: 14377 - protein, 46 aa, Homo Sapiens
ETLEMWLMPQGSLKLLGRSDQASRLQSLEVGQVPHLLSPNPHPDLG

SEQ ID NO: 14378 - protein, 45 aa, Homo Sapiens
MVASARVQKLVRRYKLAIATALAILLLQGLKGRQRKPRPLDPGEG

SEQ ID NO: 14379 - protein, 865 aa, Homo Sapiens [sequence omitted]

SEQ ID NO: 14380 - protein, 639 aa, Homo Sapiens
MVASARVQKLVRRYKLAIATALAILLLQGLVVWSFSGLEEDEAGEKGRQRKPRPLDPGEGSKDTDSSAGRRGSTGRRHGRWRGRAESPGVPVAKVVRAVTSRQRASRRVPPAPPPEAPGRQNLSGAAAGEALVGAAGFPPHGDTGSVEGAPQPTDNGFTPKCEIVGKDALSALARASTKQCQQEIANVVCLHQAGSLMPKAVPRHCQLTGKMSPGIQWDESQAQQPMDGPPVRIAYMLVVHGRAIRQLKRLLKAVYHEQHFFYIHVDKRSDYLHREVVELAQGYDNVRVTPWRMVTIWGGASLLRMYLRSMRDLLEVPGWAWDFFINLSATDYPTRTNEELVAFLSKNRDKNFLKSHGRDNSRFIKKQGLDRLFHECDSHMWRLGERQIPAGIVVDGGSDWFVLTRSFVEYVVYTDDPLVAQLRQFYTYTLLPAESFFHTVLENSLACETLVDNNLRVTNWNRKLGCKCQYKHIVDWCGCSPNDFKPQDFLRLQQVSRPTFFARKFESTVNQEVLEILDFHLYGSYPPGTPALKAYWENTYDAADGPSGLSDVMLTAYTAFARLSLHHAATAAPPMGTPLCRLALIGTPKSVFSGTLGGYWGRWTSLWPCSAGPGAPTSQPQWSGSTQPMWWPHLMTSQ

SEQ ID NO: 14381 - protein, 676 aa, Homo Sapiens
MVASARVQKLVRRYKLAIATALAILLLQGLVVWSFSGLEEDEAGEKGRQRKPRPLDPGEGSKDTDSSAGRRGSTGRRHGRWRGRAESPGVPVAKVVRAVTSRQRASRRVPPAPPPEAPGRQNLSGAAAGEALVGAAGFPPHGDTGSVEGAPQPTDNGFTPKCEIVGKDALSALARASTKQCQQEIANVVCLHQAGSLMPKAVPRHCQLTGKMSPGIQWDESQAQQPMDGPPVRIAYMLVVHGRAIRQLKRLLKAVYHEQHFFYIHVDKRSDYLHREVVELAQGYDNVRVTPWRMVTIWGGASLLRMYLRSMRDLLEVPGWAWDFFINLSATDYPTRTNEELVAFLSKNRDKNFLKSHGRDNSRFIKKQGLDRLFHECDSHMWRLGERQIPAGIVVDGGSDWFVLTRSFVEYVVYTDDPLVAQLRQFYTYTLLPAESFFHTVLENSLACETLVDNNLRVTNWNRKLGCKCQYKHIVDWCGCSPNDFKPQDFLRLQQVSRPTFFARKFESTVNQEVLEILDFHLYGSYPPGTPALKAYWENTYDAADGPSGLSDVMLTAYTAFARLSLHHAATAAPPMGTPLCRFEPRGLPSSVHLYFYDDHFQGYLVTQAVQPSAQGPAETLEMWLMPQGSLKLLGRSDQASRLQSLENRGLSMLPRLVSNSWPQAVLPLQPPKALG

SEQ ID NO: 14382 - protein, 252 aa, Homo Sapiens
MSSEVSARRDAKKLVRSPSGLRMVPEHRAFGSPFGLEEPQWVPDKECRRCMQCDAKFDFLTRKHHCRRCGKCFCDRCCSQKVPLRRMCFVDPVRQCAECALVSLKEAEFYDKQLKVLLSGATFLVTFGNSEKPETMTCRLSNNQRYLFLDGDSHYEIEIVHISTVQILTEGFPPGEKDIHAYTSLRGSQPASEGGNARATGMFLQYTVPGTEGVTQLKLTVVEDVTVGRRQAVAWLVAMHKAAKLLYESRDQ

SEQ ID NO: 14383 - protein, 234 aa, Homo Sapiens
MSSEVSARRDAKKLVRSPSGLRMVPEHRAFGSPFGLEEPQWVPDKECRRCMQCDAKFDFLTRKHHCRRCGKCFCDRCCSQKVPLRRMCFVDPVRQCAECALVSLKEAEFYDKQLKVLLSGATFLVTFGNSEKPETMTCRLSNNQRYLFLDGDSHYEIEIVHISTVQILTEGFPPGGGNARATGMFLQYTVPGTEGVTQLKLTVVEDVTVGRRQAVAWLVAMHKAAKLLYESRDQ

SEQ ID NO: 14384 - protein, 93 aa, Homo Sapiens
MSSEVSARRDAKKLVRSPSGLRMVPEHRAFGSPFGLEEPQWVPDKECRRCMQCDAKFDFLTRKVRRIPAAWWGAQGLATGGARVQRPAQGPRV

SEQ ID NO: 14385 - protein, 62 aa, Homo Sapiens
MSSEVSARRDAKKLVRSPSGLRMVPEHRAFGSPFGLEEPQWVPDKEEPPSSSRLETQRNLKL

SEQ ID NO: 14386 - protein, 115 aa, Homo Sapiens
  misc_feature (1)..(1): Xaa can be any naturally occurring amino acid
XKVLLSGATFLVTFGNSEKPETMTCRLSNNQRYLFLDGDSHYEIEIVHISTVQILTEGFPPGEKDIHAYTSLRGSQPASEGQPLPPHRGSPHAAGPFLPSPPGFCPRGGPCQGSL

SEQ ID NO: 14387 - protein, 167 aa, Homo Sapiens
MLTVALLALLCASASGNAIQARSSSYSGEYGGGGGKRFSHSGNQLDGPITALRVRVNTYYIVGLQVRYGKVWSDYVGGRNGDLEEIFLHPGESVIQVSGKYKWYLKKLVFVTDKGRYLSFGKDSGTSFNAVPLHPNTVLRFISGRSGSLIDAIGLHWDVYPSSCSRC

SEQ ID NO: 14388 - protein, 208 aa, Homo Sapiens
MGAQGAQESIKAMWRVPGTTRRPVTGESPGMHRPEAMLLLLTLALLGGPTWAGKMYGPGGGKYFSTTEDYDHEITGLRVSVGLLLVKSVQVKLGDSWDVKLGALGGNTQEVTLQPGEYITKVFVAFQAFLRGMVMYTSKDRYFYFGKLDGQISSAYPSQEGQVLVGIYGQYQLLGIKSIGFEWNYPLEEPTTEPPVNLTYSANSPVGR

SEQ ID NO: 14389 - protein, 178 aa, Homo Sapiens
MHRPEAMLLLLTLALLGGPTWAGKMYGPGGGKYFSTTEDYDHEITGLRVSVGLLLVKSVQVKLGDSWDVKLGALGGNTQEVTLQPGEYITKVFVAFQAFLRGMVMYTSKDRYFYFGKLDGQISSAYPSQEGQVLVGIYGQYQLLGIKSIGFEWNYPLEEPTTEPPVNLTYSANSPVGR

SEQ ID NO: 14390 - protein, 95 aa, Homo Sapiens
  misc_feature (1)..(1): Xaa can be any naturally occurring amino acid
XAQGAQESIKAMWRVPGTTRRPVTGESPGMHRPEAMLLLLTLALLGGPTWAGKMYGPGGGKYFSTTEDYDHEITGLRVSVGLLLVKRFLEGVIYE

SEQ ID NO: 14391 - protein, 69 aa, Homo Sapiens
  misc_feature (1)..(1): Xaa can be any naturally occurring amino acid
XRRPVTGESPGMHRPEAMLLLLTLALLGGPTWAGKMYGPGGGKYFSTTEDYDHEITGLRVSVGLLLVKR

SEQ ID NO: 14392 - protein, 372 aa, Homo Sapiens
MNGPCQSLRKAEGLLEGCTSAVTVFRKLPLDSKAQSQKMRYKTSLVMRKRLRLYRNTLKESSSSSGHHGPQLTAASSPSVFPGLHEEPPQASPSRPLNGLLRLGLPGDMYARPEPFPPGPAARSDALAAAAALHGYGGMNLTVNLAAPHGPGAFFRYMRQPIKQELICKWLAADGTATPSLCSKTFSTMHELVTHVTVEHVGGPEQANHICFWEECPRQGKPFKAKYKLVNHIRVHTGEKPFPCPFPGCGKVFARSENLKIHKRTHTGEKPFRCEFEGCERRFANSSDRKKHSHVHTSDKPYTCKVRGCDKCYTHPSSLRKHMKVHGRSPPPSSGYDSATPSALVSPSSDCGHKSQVASSAAVAARTADLSE

SEQ ID NO: 14393 - protein, 384 aa, Homo Sapiens
MPPFCRNAKLGLLSFLICAGRSLLPLGKNAFWLERIENNNTLWEKAQSQKMRYKTSLVMRKRLRLYRNTLKESSSSSGHHGPQLTAASSPSVFPGLHEEPPQASPSRPLNGLLRLGLPGDMYARPEPFPPGPAARSDALAAAAALHGYGGMNLTVNLAAPHGPGAFFRYMRQPIKQELICKWLAADGTATPSLCSKTFSTMHELVTHVTVEHVGGPEQANHICFWEECPRQGKPFKAKYKLVNHIRVHTGEKPFPCPFPGCGKVFARSENLKIHKRTHTGEKPFRCEFEGCERRFANSSDRKKHSHVHTSDKPYTCKVRGCDKCYTHPSSLRKHMKVHGRSPPPSSGYDSATPSALVSPSSDCGHKSQVASSAAVAARTADLSE

SEQ ID NO: 14394 - protein, 128 aa, Homo Sapiens
MRYKTSLVMRKRLRLYRNTLKESSEKPFRCEFEGCERRFANSSDRKKHSHVHTSDKPYTCKVRGCDKCYTHPSSLRKHMKVHGRSPPPSSGYDSATPSALVSPSSDCGHKSQVASSAAVAARTADLSE

SEQ ID NO: 14395 - protein, 68 aa, Homo Sapiens
MRYKTSLVMRKRLRLYRNTLKESSSSSGHHGPQLTAASSPSVFPGLHEEPPQASPSRPLNGLLRLGLP

SEQ ID NO: 14396 - protein, 77 aa, Homo Sapiens
MRYKTSLVMRKRLRLYRNTLKESSSSSGHHGPQLTAASSPSVFPGLHEEPPQASPSRPLNGLLRLGLPGDMYARPEP

SEQ ID NO: 14397 - protein, 229 aa, Homo Sapiens
MRYKTSLVMRKRLRLYRNTLKESSSSSGHHGPQLTAASSPSVFPGLHEEPPQASPSRPLNGLLRLGLPGDMYARPEPFPPGPAARSDALAAAAALHGYGGMNLTVNLAAPHGPGAFFRYMRQPIKQELICKWLAADGTATPSLCSKTFSTMHELVTHVTVEHVGGPEQANHICFWEECPRQGKPFKAKYKLVNHIRVHTGEKPFPCPFPGCGKVFARSENLKIHKRTHT

SEQ ID NO: 14398 - protein, 334 aa, Homo Sapiens
MRYKTSLVMRKRLRLYRNTLKESSSSSGHHGPQLTAASSPSVFPGLHEEPPQASPSRPLNGLLRLGLPGDMYARPEPFPPGPAARSDALAAAAALHGYGGMNLTVNLAAPHGPGAFFRYMRQPIKQELICKWLAADGTATPSLCSKTFSTMHELVTHVTVEHVGGPEQANHICFWEECPRQGKPFKAKYKLVNHIRVHTGEKPFPCPFPGCGKVFARSENLKIHKRTHTGEKPFRCEFEGCERRFANSSDRKKHSHVHTSDKPYTCKVRGCDKCYTHPSSLRKHMKVHGRSPPPSSGYDSATPSALVSPSSDCGHKSQVASSAAVAARTADLSE

SEQ ID NO: 14399 - protein, 334 aa, Homo Sapiens; identical to SEQ ID NO: 14398

SEQ ID NO: 14400 - protein, 334 aa, Homo Sapiens; identical to SEQ ID NO: 14398

SEQ ID NO: 14401 - protein, 497 aa, Homo Sapiens
MAMSSLGCLCALTVLIRYCNRDFDDEKILIQHQKAKHFKCHICHKKLYTGPGLAIHCMQVHKETIDAVPNAIPGRTDIELEIYGMEGIPEKDMDERRRLLEQKTQESQKKKQQDDSDEYDDDDSAASTSFQPQPVQPQQGYIPPMAQPGLPPVPGAPGMPPGIPPLMPGVPPLMPGMPPVMPGMPPGLHHQRKYTQSFCGENIMMPMGGMMPPGPGIPPLMPGMPPGMPPPVPRPGIPPMTQAQAVSAPGILNRPPAPTATVPAPQPPVTKPLFPSAGQMGTPVTSSSTASSNSESLSASSKALFPSTAQAQAAVQGPVGTDFKPLNSTPATTTEPPKPTFPAYTQSTASTTSTTNSTAAKPAASITSKPATLTTTSATSKLIHPDEDISLEERRAQLPKYQRNLPRPGQAPIGNPPVGPIGGMMPPQPGIPQQQGMRPPMPPHGQYGGHHQGMPGYLPGAMPPYGQGPPMVPPYQGGPPRPPMGMRPPVMSQGGRY

SEQ ID NO: 14402 - protein, 494 aa, Homo Sapiens
MGRKKKKQLKPWCWYCNRDFDDEKILIQHQKAKHFKCHICHKKLYTGPGLAIHCMQVHKETIDAVPNAIPGRTDIELEIYGMEGIPEKDMDERRRLLEQKTQESQKKKQQDDSDEYDDDDSAASTSFQPQPVQPQQGYIPPMAQPGLPPVPGAPGMPPGIPPLMPGVPPLMPGMPPVMPGMPPGLHHQRKYTQSFCGENIMMPMGGMMPPGPGIPPLMPGMPPGMPPPVPRPGIPPMTQAQAVSAPGILNRPPAPTATVPAPQPPVTKPLFPSAGQMGTPVTSSSTASSNSESLSASSKALFPSTAQAQAAVQGPVGTDFKPLNSTPATTTEPPKPTFPAYTQSTASTTSTTNSTAAKPAASITSKPATLTTTSATSKLIHPDEDISLEERRAQLPKYQRNLPRPGQAPIGNPPVGPIGGMMPPQPGIPQQQGMRPPMPPHGQYGGHHQGMPGYLPGAMPPYGQGPPMVPPYQGGPPRPPMGMRPPVMSQGGRY

SEQ ID NO: 14403 - protein, 463 aa, Homo Sapiens
MGRKKKKQLKPWCWYCNRDFDDEKILIQHQKAKHFKCHICHKKLYTGPGLAIHCMQVHKETIDAVPNAIPGRTDIELEIYGMEGIPEKDMDERRRLLEQKTQESQKKKQQDDSDEYDDDDSAASTSFQPQPVQPQQGYIPPMAQPGLPPVPGAPGMPPGIPPLMPGVPPLMPGMPPVMPGMPPGLHHQRKYTQSFCGENIMMPMGGMMPPGPGIPPLMPGMPPGMPPPVPRPGIPPMTQAQAVSAPGILNRPPAPTATVPAPQPPVTKPLFPSAGQAQAAVQGPVGTDFKPLNSTPATTTEPPKPTFPAYTQSTASTTSTTNSTAAKPAASITSKPATLTTTSATSKLIHPDEDISLEERRAQLPKYQRNLPRPGQAPIGNPPVGPIGGMMPPQPGIPQQQGMRPPMPPHGQYGGHHQGMPGYLPGAMPPYGQGPPMVPPYQGGPPRPPMGMRPPVMSQGGRY

SEQ ID NO: 14404 - protein, 493 aa, Homo Sapiens
MGRKKKKQLKPWCWYCNRDFDDEKILIQHQKAKHFKCHICHKKLYTGPGLAIHCMQVHKETIDAVPNAIPGRTDIELEIYGMEGIPEKDMDERRRLLEQKTQESQKKKQQDDSDEYDDDDSAASTSFQPQPVQPQQGYIPPMAQPGLPPVPGAPGMPPGIPPLMPGVPPLMPGMPPVMPGMPPGLHHQRKYTQSFCGENIMMPMGGMMPPGPGIPPLMPGMPPGMPPPVPRPGIPPMTQAQAVSAPGILNRPPAPTATVPAPQPPVTKPLFPSAGQMGTPVTSSSTASSNSESLSASSKALFPSTAQAQAAVQGPVGTDFKPLNSTPATTTEPPKPTFPAYTQSTASTTSTTNSTAAKPAASITSKPATLTTTSATSKLIHPDEDISLEERRAQLPKYQRNLPRPGQAPIGNPPVGPIGGMMPPQPGIPQQQGMRPPMPPHGQYGGHHQGMPGYLPGAMPPYGQGPPMVPPYQGGPPRPPMGMRPPVMSQALP

SEQ ID NO: 14405 - protein, 478 aa, Homo Sapiens
MGRKKKKQLKPWCWYCNRDFDDEKILIQHQKAKHFKCHICHKKLYTGPGLAIHCMQVHKETIDAVPNAIPGRTDIELEIYGMEGIPEKDMDERRRLLEQKTQESQKKKQQDDSDEYDDDDSAASTSFQPQPVQPQQGYIPPMAQPGLPPVPGAPGMPPGIPPLMPGVPPLMPGMPPVMPGMPPGMMPMGGMMPPGPGIPPLMPGMPPGMPPPVPRPGIPPMTQAQAVSAPGILNRPPAPTATVPAPQPPVTKPLFPSAGQMGTPVTSSSTASSNSESLSASSKALFPSTAQAQAAVQGPVGTDFKPLNSTPATTTEPPKPTFPAYTQSTASTTSTTNSTAAKPAASITSKPATLTTTSATSKLIHPDEDISLEERRAQLPKYQRNLPRPGQAPIGNPPVGPIGGMMPPQPGIPQQQGMRPPMPPHGQYGGHHQGMPGYLPGAMPPYGQGPPMVPPYQGGPPRPPMGMRPPVMSQGGRY

SEQ ID NO: 14406 - protein, 46 aa, Homo Sapiens
MQVHKETIDAVPNAIPGRTDIELEIYGMEGIPEKDMDERRRLLEQK

SEQ ID NO: 14407 - protein, 74 aa, Homo Sapiens
MQVHKETIDAVPNAIPGRTDIELEIYGMEGIPEKDMDERRRLLEQKTQESQKKKQQDDSDEYDDDDSAASTSFQ

SEQ ID NO: 14408 - protein, 93 aa, Homo Sapiens
MQVHKETIDAVPNAIPGRTDIELEIYGMEGIPEKDMDERRRLLEQKTQESQKKKQQDDSDEYDDDDSAASTSFQPQPVQPQQGYIPPMAQPGL

SEQ ID NO: 14409 - protein, 96 aa, Homo Sapiens
MQVHKETIDAVPNAIPGRTDIELEIYGMEGIPEKDMDERRRLLEQKTQESQKKKQQDDSDEYDDDDSAASTSFQPQPVQPQQGYIPPMAQPGLPPV

SEQ ID NO: 14410 - protein, 198 aa, Homo Sapiens
MQVHKETIDAVPNAIPGRTDIELEIYGMEGIPEKDMDERRRLLEQKTQESQKKKQQDDSDEYDDDDSAASTSFQPQPVQPQQGYIPPMAQPGLPPVPGAPGMPPGIPPLMPGVPPLMPGMPPVMPGMPPGLHHQRKYTQSFCGENIMMPMGGMMPPGPGIPPLMPGMPPGMPPPVPRPGIPPMTQAQAVSAPGILNRP

SEQ ID NO: 14411 - protein, 341 aa, Homo Sapiens
  misc_feature (1)..(1): Xaa can be any naturally occurring amino acid
XGMPPGIPPLMPGVPPLMPGMPPVMPGMPPGLHHQRKYTQSFCGENIMMPMGGMMPPGPGIPPLMPGMPPGMPPPVPRPGIPPMTQAQAVSAPGILNRPPAPTATVPAPQPPVTKPLFPSAGQMGTPVTSSSTASSNSESLSASSKALFPSTAQAQAAVQGPVGTDFKPLNSTPATTTEPPKPTFPAYTQSTASTTSTTNSTAAKPAASITSKPATLTTTSATSKLIHPDEDISLEERRAQLPKYQRNLPRPGQAPIGNPPVGPIGGMMPPQPGIPQQQGMRPPMPPHGQYGGHHQGMPGYLPGAMPPYGQGPPMVPPYQGGPPRPPMGMRPPVMSQGGRY

SEQ ID NO: 14412 - protein, 80 aa, Homo Sapiens
MATSFRTASCWGLLSFKDISMEFTWDEWQLLDSTQKYLYRDVILENYHNLISVDGWEEWYQNNQDELESIERSYACSVLG

SEQ ID NO: 14413 - protein, 533 aa, Homo Sapiens
MATSFRTASCWGLLSFKDISMEFTWDEWQLLDSTQKYLYRDVILENYHNLISVGYHGTKPDLIFKLEQGEDPWIINAKISRQSCPDGWEEWYQNNQDELESIERSYACSVLGRLNLSKTHDSSRQRLYNTRGKSLTQNSAPSRSYLRKNPDKFHGYEEPYFLKHQRAHSIEKNCVCSECGKAFRCKSQLIVHLRIHTGERPYECSKCERAFSAKSNLNAHQRVHTGEKPYSCSECEKVFSFRSQLIVHQEIHTGGKPYGCSECGKAYSWKSQLLLHQRSHTGVKPYECSECGKAFSLKSPFVVHQRTHTGVKPHKCSECGKAFRSKSYLLVHIRMHTGEKPYQCSDCGKAFNMKTQLIVHQGVHTGNNPYQCGECGKAFGRKEQLTAHLRAHAGEKPYGCSECGKAFSSKSYLVIHRRTHTGERPYECSLCERAFCGKSQLIIHQRTHSTEKPYECNECEKAYPRKASLQIHQKTHSGEKPFKCSECGKAFTQKSSLSEHQRVHTGEKPWKCSECGKSFCWNSGLRIHRKTHK

SEQ ID NO: 14414 - protein, 153 aa, Homo Sapiens
MATSFRTASCWVVLLRRSLLMSSSVKFGNLLGVPWAQGNSALPEGLLSFKDISMEFTWDEWQLLDSTQKYLYRDVILENYHNLISVGYHGTKPDLIFKLEQGEDPWIINAKISRQSCPDGWEEWYQNNQDELESIERSYACSVLGRLNLSKTH

SEQ ID NO: 14415 - protein, 513 aa, Homo Sapiens
MEFTWDEWQLLDSTQKYLYRDVILENYHNLISVGYHGTKPDLIFKLEQGEDPWIINAKISRQSCPDGWEEWYQNNQDELESIERSYACSVLGRLNLSKTHDSSRQRLYNTRGKSLTQNSAPSRSYLRKNPDKFHGYEEPYFLKHQRAHSIEKNCVCSECGKAFRCKSQLIVHLRIHTGERPYECSKCERAFSAKSNLNAHQRVHTGEKPYSCSECEKVFSFRSQLIVHQEIHTGGKPYGCSECGKAYSWKSQLLLHQRSHTGVKPYECSECGKAFSLKSPFVVHQRTHTGVKPHKCSECGKAFRSKSYLLVHIRMHTGEKPYQCSDCGKAFNMKTQLIVHQGVHTGNNPYQCGECGKAFGRKEQLTAHLRAHAGEKPYGCSECGKAFSSKSYLVIHRRTHTGERPYECSLCERAFCGKSQLIIHQRTHSTEKPYECNECEKAYPRKASLQIHQKTHSGEKPFKCSECGKAFTQKSSLSEHQRVHTGEKPWKCSECGKSFCWNSGLRIHRKTHK

SEQ ID NO: 14416 - protein, 264 aa, Homo Sapiens
MAALFLSAPPQAEVTFEDVAVYLSREEWGRLGPAQRGLYRDVMLETYGNLVSLALGTRTEYKELTSQETFGEEDPQGSEPVEACDHISKSEGSLEKLVEQRGPRAVTLTNGESSRESGGNLRLLSRPVPDQRPHKCDICEQSFEQRSYLNNHKRVHRSKKTNTVRNSGEIFSANLVVKEDQKIPTGKKLHYCSYCGKTFRYSANLVKHQRLHTEEKPYKCDECGKAFSQSCEFINHRRMHSGEIPYRCDECGKTFTRRPNLMKH

SEQ ID NO: 14417 - protein, 539 aa, Homo Sapiens
MAALFLSAPPQAEVTFEDVAVYLSREEWGRLGPAQRGLYRDVMLETYGNLVSLGVGPAGPKPGVISQLERGDEPWVLDVQGTSGKEHLRVNSPALGTRTEYKELTSQETFGEEDPQGSEPVEACDHISKSEGSLEKLVEQRGPRAVTLTNGESSRESGGNLRLLSRPVPDQRPHKCDICEQSFEQRSYLNNHKRVHRSKKTNTVRNSGEIFSANLVVKEDQKIPTGKKLHYCSYCGKTFRYSANLVKHQRLHTEEKPYKCDECGKAFSQSCEFINHRRMHSGEIPYRCDECGKTFTRRPNLMKHQRIHTGEKPYKCGECGKHFSAYSSLIYHQRIHTGEKPYKCNDCGKAFSDGSILIRHRRTHTGEKPFECKECGKGFTQSSNLIQHQRIHTGEKPYKCNECEKAFIQKTKLVEHQRSHTGEKPYECNDCGKVFSQSTHLIQHQRIHTGEKPYKCSECGKAFHNSSRLIHHQRLHHGEKPYRCSDCKKAFSQSTYLIQHRRIHTGEKPYKCSECGKAFRHSSNMCQHQRIHLREDFSM

SEQ ID NO: 14418 - protein, 158 aa, Homo Sapiens
MLLLLSDQLLLTALRKPNPQAMAALFLSAPPQAEVTFEDVAVYLSREEWGRLGPAQRGLYRDVMLETYGNLVSLALGTRTEYKELTSQETFGEEDPQGSEPVEACDHISKSEGSLEKLVEQRGPRAVTLTNGESSRESGGNLRLLSRPVPDQRPHKCD

SEQ ID NO: 14419 - protein, 560 aa, Homo Sapiens
MLLLLSDQLLLTALRKPNPQAMAALFLSAPPQAEVTFEDVAVYLSREEWGRLGPAQRGLYRDVMLETYGNLVSLGVGPAGPKPGVISQLERGDEPWVLDVQGTSGKEHLRVNSPALGTRTEYKELTSQETFGEEDPQGSEPVEACDHISKSEGSLEKLVEQRGPRAVTLTNGESSRESGGNLRLLSRPVPDQRPHKCDICEQSFEQRSYLNNHKRVHRSKKTNTVRNSGEIFSANLVVKEDQKIPTGKKLHYCSYCGKTFRYSANLVKHQRLHTEEKPYKCDECGKAFSQSCEFINHRRMHSGEIPYRCDECGKTFTRRPNLMKHQRIHTGEKPYKCGECGKHFSAYSSLIYHQRIHTGEKPYKCNDCGKAFSDGSILIRHRRTHTGEKPFECKECGKGFTQSSNLIQHQRIHTGEKPYKCNECEKAFIQKTKLVEHQRSHTGEKPYECNDCGKVFSQSTHLIQHQRIHTGEKPYKCSECGKAFHNSSRLIHHQRLHHGEKPYRCSDCKKAFSQSTYLIQHRRIHTGEKPYKCSECGKAFRHSSNMCQHQRIHLREDFSM

SEQ ID NO: 14420 - protein, 464 aa, Homo Sapiens
MAAAALRDPAQGYVTFEDVAVYFSQEEWRLLDDAQRLLYRNVMLENFTLLASLGCWHGAEAEEAPEQIASVGLLSSNIQQHQKQHCGEKPLKRQEGRVPVLRSCKVHLSEKSLQSREVGKALLISSGVLKHQVTHTGEKSHRSSKSREAFHAGKRHYKCSECGKAFGQKYLLVQHQRLHAGKKTYECSECGKLFRDMSNLFIHQIVHTGERPYGCSNCGKSFSRNAHLIEHQRVHTGEKPFTCSECGKAFRHNSTLVQHHKIHTGVRPYECSECGKLFSFNSSLMKHQRIHTGERPYKCSECGKFYSHKSNLIKHWRVHTGERPYKCSDCGKFFTQCSSLMQHQKVHTGEKPFKCNECGRFFRENSTLVRHQRVHTGAKPYECRECGKFFSQSSTLMQHRKVHIGEKPFKCNECGRLFRENSSLVKHQRVHTGAKPYECRECGKFFRHNSSLFKHRRIHTGEMQ

SEQ ID NO: 14421 - protein, 113 aa, Homo Sapiens
MAAAALRDPAQGYVTFEDVAVYFSQEEWRLLDDAQRLLYRNVMLENFTLLASLGKVLTPHPSILSWARLFLLFLGRGLFFPKLNCGHSFLLQYPEVAIVIGLGCVYYHLLSPS

SEQ ID NO: 14422 - protein, 497 aa, Homo Sapiens
MAAAALRDPAQGYVTFEDVAVYFSQEEWRLLDDAQRLLYRNVMLENFTLLASLGLASSKTHEITQLESWEEPFMPAWEVVTSAIPRGCWHGAEAEEAPEQIASVGLLSSNIQQHQKQHCGEKPLKRQEGRVPVLRSCKVHLSEKSLQSREVGKALLISSGVLKHQVTHTGEKSHRSSKSREAFHAGKRHYKCSECGKAFGQKYLLVQHQRLHAGKKTYECSECGKLFRDMSNLFIHQIVHTGERPYGCSNCGKSFSRNAHLIEHQRVHTGEKPFTCSECGKAFRHNSTLVQHHKIHTGVRPYECSECGKLFSFNSSLMKHQRIHTGERPYKCSECGKFYSHKSNLIKHWRVHTGERPYKCSDCGKFFTQCSSLMQHQKVHTGEKPFKCNECGRFFRENSTLVRHQRVHTGAKPYECRECGKFFSQSSTLMQHRKVHIGEKPFKCNECGRLFRENSSLVKHQRVHTGAKPYECRECGKFFRHNSSLFKHRRIHTGEMQ

SEQ ID NO: 14423 - protein, 121 aa, Homo Sapiens
MAAAALRDPAQQGYVTFEDVAVYFSQEEWRLLDDAQRLLYRNVMLENFTLLASLGCWHGAEAEEAPEQIASVGLLSSNIQQHQKQHCGEKPLKRQEGRVPVLRSCKVHLSEKSLQSREVGK

SEQ ID NO: 14424 - protein, 442 aa, Homo Sapiens
MAAAALRDPAQQGYVTFEDVAVYFSQEEWRLLDDAQRLLYRNVMLENFTLLASLGLASSKTHEITQLESWEEPFMPAWEVVTSAIPRGCWHGAEAEEAPEQIASVGLLSSNIQQHQKQHCGEKPLKRQEGRVPVLRSCKVHLSEKSLQSREVGKALLISSGVLKHQVTHTGEKSHRSSKSREAFHAGKRHYKCSECGKAFGQKYLLVQHQRLHAGKKTYECSECGKLFRDMSNLFIHQIVHTGERPYGCSNCGKSFSRNAHLIEHQRVHTGEKPFTCSECGKAFRHNSTLVQHHKIHTGVRPYECSECGKLFSFNSSLMKHQRIHTGERPYKCSECGKFYSHKSNLIKHWRVHTGERPYKCSDCGKFFTQCSSLMQHQKVHTGEKPFKCNECGRFFRENSSLVKHQRVHTGAKPYECRECGKFFRHNSSLFKHRRIHTGEMQ

SEQ ID NO: 14425 - protein, 498 aa, Homo Sapiens
MAAAALRDPAQQGYVTFEDVAVYFSQEEWRLLDDAQRLLYRNVMLENFTLLASLGLASSKTHEITQLESWEEPFMPAWEVVTSAIPRGCWHGAEAEEAPEQIASVGLLSSNIQQHQKQHCGEKPLKRQEGRVPVLRSCKVHLSEKSLQSREVGKALLISSGVLKHQVTHTGEKSHRSSKSREAFHAGKRHYKCSECGKAFGQKYLLVQHQRLHAGKKTYECSECGKLFRDMSNLFIHQIVHTGERPYGCSNCGKSFSRNAHLIEHQRVHTGEKPFTCSECGKAFRHNSTLVQHHKIHTGVRPYECSECGKLFSFNSSLMKHQRIHTGERPYKCSECGKFYSHKSNLIKHWRVHTGERPYKCSDCGKFFTQCSSLMQHQKVHTGEKPFKCNECGRFFRENSTLVRHQRVHTGAKPYECRECGKFFSQSSTLMQHRKVHIGEKPFKCNECGRLFRENSSLVKHQRVHTGAKPYECRECGKFFRHNSSLFKHRRIHTGEMQ

SEQ ID NO: 14426 - protein, 97 aa, Homo Sapiens
MAAAALRDPAQQGYVTFEDVAVYFSQEEWRLLDDAQRLLYRNVMLENFTLLASLGLASSKTHEITQLESWEEPFMPAWEVVTSAIPRGSWWVELREV

SEQ ID NO: 14427 - protein, 173 aa, Homo Sapiens
MAAAALRDPAQVPVAADLLTDHEEGYVTFEDVAVYFSQEEWRLLDDAQRLLYRNVMLENFTLLASLGCWHGAEAEEAPEQIASVGLLSSNIQQHQKQHCGEKPLKRQEGRVPVLRSCKVHLSEKSLQSREVGKALLISSGVLKHQVTHTGEKSHRSSKSREAFHAGKRHYKCS

SEQ ID NO: 14428 - protein, 87 aa, Homo Sapiens
MAAAALRDPAQVPVAADLLTDHEEGYVTFEDVAVYFSQEEWRLLDDAQRLLYRNVMLENFTLLASLGKVLTPHPSILSWARLFLLFL

SEQ ID NO: 14429 - protein, 510 aa, Homo Sapiens
MAAAALRDPAQVPVAADLLTDHEEGYVTFEDVAVYFSQEEWRLLDDAQRLLYRNVMLENFTLLASLGLASSKTHEITQLESWEEPFMPAWEVVTSAIPRGCWHGAEAEEAPEQIASVGLLSSNIQQHQKQHCGEKPLKRQEGRVPVLRSCKVHLSEKSLQSREVGKALLISSGVLKHQVTHTGEKSHRSSKSREAFHAGKRHYKCSECGKAFGQKYLLVQHQRLHAGKKTYECSECGKLFRDMSNLFIHQIVHTGERPYGCSNCGKSFSRNAHLIEHQRVHTGEKPFTCSECGKAFRHNSTLVQHHKIHTGVRPYECSECGKLFSFNSSLMKHQRIHTGERPYKCSECGKFYSHKSNLIKHWRVHTGERPYKCSDCGKFFTQCSSLMQHQKVHTGEKPFKCNECGRFFRENSTLVRHQRVHTGAKPYECRECGKFFSQSSTLMQHRKVHIGEKPFKCNECGRLFRENSSLVKHQRVHTGAKPYECRECGKFFRHNSSLFKHRRIHTGEMQ

SEQ ID NO: 14430 - protein, 478 aa, Homo Sapiens
MAAAALRDPAQVPVAADLLTDHEEQGYVTFEDVAVYFSQEEWRLLDDAQRLLYRNVMLENFTLLASLGCWHGAEAEEAPEQIASVGLLSSNIQQHQKQHCGEKPLKRQEGRVPVLRSCKVHLSEKSLQSREVGKALLISSGVLKHQVTHTGEKSHRSSKSREAFHAGKRHYKCSECGKAFGQKYLLVQHQRLHAGKKTYECSECGKLFRDMSNLFIHQIVHTGERPYGCSNCGKSFSRNAHLIEHQRVHTGEKPFTCSECGKAFRHNSTLVQHHKIHTGVRPYECSECGKLFSFNSSLMKHQRIHTGERPYKCSECGKFYSHKSNLIKHWRVHTGERPYKCSDCGKFFTQCSSLMQHQKVHTGEKPFKCNECGRFFRENSTLVRHQRVHTGAKPYECRECGKFFSQSSTLMQHRKVHIGEKPFKCNECGRLFRENSSLVKHQRVHTGAKPYECRECGKFFRHNSSLFKHRRIHTGEMQ

SEQ ID NO: 14431 - protein, 115 aa, Homo Sapiens [sequence omitted]

SEQ ID NO: 14432 - protein, 511 aa, Homo Sapiens
MAAAALRDPAQVPVAADLLTDHEEQGYVTFEDVAVYFSQEEWRLLDDAQRLLYRNVMLENFTLLASLGLASSKTHEITQLESWEEPFMPAWEVVTSAIPRGCWHGAEAEEAPEQIASVGLLSSNIQQHQKQHCGEKPLKRQEGRVPVLRSCKVHLSEKSLQSREVGKALLISSGVLKHQVTHTGEKSHRSSKSREAFHAGKRHYKCSECGKAFGQKYLLVQHQRLHAGKKTYECSECGKLFRDMSNLFIHQIVHTGERPYGCSNCGKSFSRNAHLIEHQRVHTGEKPFTCSECGKAFRHNSTLVQHHKIHTGVRPYECSECGKLFSFNSSLMKHQRIHTGERPYKCSECGKFYSHKSNLIKHWRVHTGERPYKCSDCGKFFTQCSSLMQHQKVHTGEKPFKCNECGRFFRENSTLVRHQRVHTGAKPYECRECGKFFSQSSTLMQHRKVHIGEKPFKCNECGRLFRENSSLVKHQRVHTGAKPYECRECGKFFRHNSSLFKHRRIHTGEMQ

SEQ ID NO: 14433 - protein, 110 aa, Homo Sapiens
MAAAALRDPAQVPVAADLLTDHEEQGYVTFEDVAVYFSQEEWRLLDDAQRLLYRNVMLENFTLLASLGLASSKTHEITQLESWEEPFMPAWEVVTSAIPRGSWWVELREV

SEQ ID NO: 14434 - protein, 50 aa, Homo Sapiens
MLENFTLLASLGCWHGAEAEEAPEQIASVGLLSSNIQQHQKQHCGEKPLK

SEQ ID NO: 14435 - protein, 77 aa, Homo Sapiens
MASFGASLWPDLGACSQHLSLYHSVTVELAASTARHPASSLQEDSVAFEDVAVTFTQEEWALLDPSQKNLCRDVMQE

SEQ ID NO: 14436 - protein, 207 aa, Homo Sapiens
MDSVAFEDVAVTFTQEEWALLDPSQKNLCRDVMQETFRNLASIGKKWKPQNIYVEYENLRRNLRIVGERLFESKEGHQHGEILTQVPDDMLKKTTTGVKSCESSVYGEVGSAHSSLNRHIRDDTGHKAYEYQEYGQKPYKCKYCKKPFNCLSSVQTHERAHSGRKLYVCEECGKTFISHSNLQRHRIMHRGDGPYKCKFCGKALMFL

SEQ ID NO: 14437 - protein, 77 aa, Homo Sapiens
MFQDSVAFEDVAVTFTQEEWALLDPSQKNLCRDVMQETFRNLASIGKKWKPQNIYVEYENLRRNLRIVGERLFESKE

SEQ ID NO: 14438 - protein, 41 aa, Homo Sapiens
MGDRNCRENHASMPGKVSGSLEVMKSMFKVLTDLVPGFSGL

SEQ ID NO: 14439 - protein, 117 aa, Homo Sapiens
MLVLSILLYTCEMFQDSVAFEDVAVTFTQEEWALLDPSQKNLCRDVMQETFRNLASIGKKWKPQNIYVEYENLRRNLRIVGERLFESKEGHQHGEILTQVPDDMLKKTTTGVKSCES

SEQ ID NO: 14440 - protein, 166 aa, Homo Sapiens
MLVLSILLYTCEMFQDSVAFEDVAVTFTQEEWALLDPSQKNLCRDVMQETFRNLASIGKKWKPQNIYVEYENLRRNLRIVGERLFESKEGHQHGEILTQVPDDMLKKTTTGVKSCESSVYGEVGSAHSSLNRHIRDDTGHKAYEYQEYGQKPYKCKYCKKPFNCLS

SEQ ID NO: 14441 - protein, 673 aa, Homo Sapiens
MMFQDSVAFEDVAVTFTQEEWALLDPSQKNLCRDVMQETFRNLASIGKKWKPQNIYVEYENLRRNLRIVGERLFESKEGHQHGEILTQVPDDMLKKTTTGVKSCESSVYGEVGSAHSSLNRHIRDDTGHKAYEYQEYGQKPYKCKYCKKPFNCLSSVQTHERAHSGRKLYVCEECGKTFISHSNLQRHRIMHRGDGPYKCKFCGKALMFLSLYLIHKRTHTGEKPYQCKQCGKAFSHSSSLRIHERTHTGEKPYKCNECGKAFHSSTCLHAHKRTHTGEKPYECKQCGKAFSSSHSFQIHERTHTGEKPYECKECGKAFKCPSSVRRHERTHSRKKPYECKHCGKVLSYLTSFQNHLGMHTGEISHKCKICGKAFYSPSSLQTHEKTHTGEKPYKCNQCGKAFNSSSSFRYHERTHTGEKPYECKQCGKAFRSASLLQTHGRTHTGEKPYACKECGKPFSNFSFFQIHERMHREEKPYECKGYGKTFSLPSLFHRHERTHTGGKTYECKQCGRSFNCSSSFRYHGRTHTGEKPYECKQCGKAFRSASQLQIHGRTHTGEKPYECKQCGKAFGSASHLQMHGRTHTGEKPYECKQCGKSFGCASRLQMHGRTHTGEKPYKCKQCGKAFGCPSNLRRHGRTHTGEKPYKCNQCGKVFRCSSQLQVHGRAHCIDTP

SEQ ID NO: 14442 - protein, 52 aa, Homo Sapiens
MQETFRNLASIGKKWKPQNIYVEYENLRRNLRIVGERLFESKEGHQHGEILT

SEQ ID NO: 14443 - protein, 119 aa, Homo Sapiens
MQETFRNLASIGKKWKPQNIYVEYENLRRNLRIVGERLFESKEGHQHGEILTQVPDDMLKKTTTGVKSCESSVYGEVGSAHSSLNRHIRDDTGHKAYEYQEYGQKPYKCKYCKKPFNCL

SEQ ID NO: 14444 - protein, 638 aa, Homo Sapiens
MQETFRNLASIGKKWKPQNIYVEYENLRRNLRIVGERLFESKEGHQHGEILTQVPDDMLKKTTTGVKSCESSVYGEVGSAHSSLNRHIRDDTGHKAYEYQEYGQKPYKCKYCKKPFNCLSSVQTHERAHSGRKLYVCEECGKTFISHSNLQRHRIMHRGDGPYKCKFCGKALMFLSLYLIHKRTHTGEKPYQCKQCGKAFSHSSSLRIHERTHTGEKPYKCNECGKAFHSSTCLHAHKRTHTGEKPYECKQCGKAFSSSHSFQIHERTHTGEKPYECKECGKAFKCPSSVRRHERTHSRKKPYECKHCGKVLSYLTSFQNHLGMHTGEISHKCKICGKAFYSPSSLQTHEKTHTGEKPYKCNQCGKAFNSSSSFRYHERTHTGEKPYECKQCGKAFRSASLLQTHGRTHTGEKPYACKECGKPFSNFSFFQIHERMHREEKPYECKGYGKTFSLPSLFHRHERTHTGGKTYECKQCGRSFNCSSSFRYHGRTHTGEKPYECKQCGKAFRSASQLQIHGRTHTGEKPYECKQCGKAFGSASHLQMHGRTHTGEKPYECKQCGKSFGCASRLQMHGRTHTGEKPYKCKQCGKAFGCPSNLRRHGRTHTGEKPYKCNQCGKVFRCSSQLQVHGRAHCIDTP

SEQ ID NO: 14445 - protein, 518 aa, Homo Sapiens
MAVALGCAIQASLNQGSVFQEYDTDCEVFRQRFRQFQYREAAGPHEAFNKLWELCCQWLKPKMRSKEQILELLVLEQFLTILPTEIETWVREHCPENRERVVSLIEDLQRELEIPEQQVDMHDMLLEELAPVGTAHIPPTMHLESPALQVMGPAQEAPVAEAWIPQAGPPELNYGATGECQNFLDPGYPLPKLDMNFSLENREEPWVKELQDSKEMKQLLDSKIGFEIGIENEEDTSKQKKMETMYPFIVTLEGNALQGPILQKDYVQLENQWETPPEDLQTDLAKLVDQQNPTLGETPENSNLEEPLNPKPHKKKSPGEKPHRCPQCGKCFARKSQLTGHQRIHSGEEPHKCPECGKRFLRSSDLYRHQRLHTGERPYECTVCKKRFTRRSHLIGHQRTHSEEETYKCLECGKSFCHGSSLKRHLKTHTGEKPHRCHNCGKSFSRLTALTLHQRTHTEERPFKCNYCGKSFRQRPSLVIHLRIHTGEKPYKCTHCSKSFRQRAGLIMHQVTHFRGLI

SEQ ID NO: 14446 - protein, 164 aa, Homo Sapiens
MAVALGCAIQASLNQGSVFQEYDTDCEVFRQRFRQFQYREAAGPHEAFNKLWELCCQWLKPKMRSKEQILELLVLEQFLTILPTEIETWVREHCPENRERVVSLIEDLQRELEIPEQQVRKECGIFVIGPKEVAEAAGTRPHICLYVIPQPQDFSRVLFLFLFC

SEQ ID NO: 14447 - protein, 233 aa, Homo Sapiens
MKDRQVDAQAQEREHDDPTGQPGAPQLTQNIPRGPAGSKVFSVWPSGARSEQRSAFSKPTKRPAERPELTSVFPAGESADALGELSGLLNTTDLACWGRLSTPKLLVGDLWNLQALPQNAPLCSTFLGAPTLWLEHTQAQVPPPSSSSTTSWALLPPTLTSLGLSTQNWCAKCNLSFRLTSDLVFHMRSHHKKEHAGPDPHSQKRREEALACPVCQEHFRERHHLSRHMTSHS

SEQ ID NO: 14448 - protein, 340 aa, Homo Sapiens
MPEWPPCLSVAPALVITMAAGKGAPLSPSAENRWRLSEPELGRGCKPVLLEKTNRLGPEAAVGRAGRDVGSAELALLVAPGKPRPGKPLPPKTRGEQRQSAFTELPRMKDRQVDAQAQEREHDDPTGQPGAPQLTQNIPRGPAGSKVFSVWPSGARSEQRSAFSKPTKRPAERPELTSVFPAGESADALGELSGLLNTTDLACWGRLSTPKLLVGDLWNLQALPQNAPLCSTFLGAPTLWLEHTQAQVPPPSSSSTTSWALLPPTLTSLGLSTQNWCAKCNLSFRLTSDLVFHMRSHHKKEHAGPDPHSQKRREEALACPVCQEHFRERHHLSRHMTSHS

SEQ ID NO: 14449 - protein, 252 aa, Homo Sapiens
MQLPPALCARLAAGPGAAEPLPVERDPAAGAAPFRFVARPVRFPREHQFFEDGDVQRHLYLQDVIMQVADVPEKPRVPAFACQVAGCCQVFDALDDYEHHYHTLHGNVCSFCKRAFPSGHLLDAHILEWHDSLFQILSERQDMYQCLVEGCTEKFKTSRDRKDHMVRMHLYPADFRFDKPKKSRSPASAEAPGDSGERSEGEAMEICSEPVAASPAPAGERRIYRHRIPSTICFGQGAARGFKSNKKKTKQC

SEQ ID NO: 14450 - protein, 262 aa, Homo Sapiens
MQLPPALCARLAAGPGAAEPLPVERDPAAGAAPFRFVARPVRFPREHQFFEDGDVQRHLYLQDVIMQVADVPEKPRVPAFACQVAGCCQVFDALDDYEHHYHTLHGNVCSFCKRAFPSGHLLDAHILEWHDSLFQILSERQDMYQCLVEGCTEKFKTSRDRKDHMVRMHLYPADFRFDKPKKSRSPASAEAPGDSGERSEGEAMEICSEPVAASPAPAGERRIYRHRSVSELFLKPVLNMCSVLRILGCTWAAALLILNSER

SEQ ID NO: 14451 - protein, 86 aa, Homo Sapiens
MAVGLLKAMYQELVTFRDVAVDFSQEEWDCLDSSQRHLYSNVMLENYRILVSLGLCFSKPSVILLLEQGKAPWMVKRELTKGLCSG

SEQ ID NO: 14452 - protein, 148 aa, Homo Sapiens
MAVGLLKAMYQELVTFRDVAVDFSQEEWDCLDSSQRHLYSNVMLENYRILVSLGLCFSKPSVILLLEQGKAPWMVKRELTKGLCSGWEPICETEELTPKQDFYEEHQSQKIIETLTSYNLEYSSLREEWKCEGYFERQPGNQKACFKE

SEQ ID NO: 14453 - protein, 536 aa, Homo Sapiens
MAVGLLKAMYQELVTFRDVAVDFSQEEWDCLDSSQRHLYSNVMLENYRILVSLGLCFSKPSVILLLEQGKAPWMVKRELTKGLCSGWEPICETEELTPKQDFYEEHQSQKIIETLTSYNLEYSSLREEWKCEGYFERQPGNQKACFKEEIITHEEPLFDEREQEYKSWGSFHQNPLLCTQKIIPKEEKVHKHDTQKRSFKKNLMAIKPKSVCAEKKLLKCNDCEKVFSQSSSLTLHQRIHTGEKPYKCIECGKAFSQRSNLVQHQRIHTGEKPYECKECRKAFSQNAHLVQHLRVHTGEKPYECKVCRKAFSQFAYLAQHQRVHTGEKPYECIECGKAFSNRSSIAQHQRVHTGEKPYECNVCGKAFSLRAYLTVHQRIHTGERPYECKECGKAFSQNSHLAQHQRIHTGEKPYKCQECRKAFSQIAYLAQHQRVHTGEKPYECIECGKAFSNDSSLTQHQRVHTGEKPYECTVCGKAFSYCGSLAQHQRIHTGERPYECKECKKTFRQHAHLAHHQRIHIGESLSPPNPVNHQVL

SEQ ID NO: 14454 - protein, 592 aa, Homo Sapiens
MCMYLFFLDFSIVGSGLRSGVWVSGSSSQAICVTPVRVESSEATAISQEKSQEEERMAVGLLKAMYQELVTFRDVAVDFSQEEWDCLDSSQRHLYSNVMLENYRILVSLGLCFSKPSVILLLEQGKAPWMVKRELTKGLCSGWEPICETEELTPKQDFYEEHQSQKIIETLTSYNLEYSSLREEWKCEGYFERQPGNQKACFKEEIITHEEPLFDEREQEYKSWGSFHQNPLLCTQKIIPKEEKVHKHDTQKRSFKKNLMAIKPKSVCAEKKLLKCNDCEKVFSQSSSLTLHQRIHTGEKPYKCIECGKAFSQRSNLVQHQRIHTGEKPYECKECRKAFSQNAHLVQHLRVHTGEKPYECKVCRKAFSQFAYLAQHQRVHTGEKPYECIECGKAFSNRSSIAQHQRVHTGEKPYECNVCGKAFSLRAYLTVHQRIHTGERPYECKECGKAFSQNSHLAQHQRIHTGEKPYKCQECRKAFSQIAYLAQHQRVHTGEKPYECIECGKAFSNDSSLTQHQRVHTGEKPYECTVCGKAFSYCGSLAQHQRIHTGERPYECKECKKTFRQHAHLAHHQRIHIGESLSPPNPVNHQVL

SEQ ID NO: 14455 - protein, 44 aa, Homo Sapiens
MCMYLFFLDFSIVSVTVLLDFMTRDRERKVVWPDRLTSKQTWPY

SEQ ID NO: 14456 - protein, 44 aa, Homo Sapiens
MLENYRILVSLGLCFSKPSVILLLEQGKAPWMVKRELTKGLCSG

SEQ ID NO: 14457 - protein, 306 aa, Homo Sapiens
MAQISSGGGGQSRCLLFALGSEMGSEKEQSPEPHLPEEGEGGKPWRVDDSEGSWIPPGEKEHGQESLSDELQETHPKKPWQKVTVRARELGDPIAHPRHEADEKPFICAQCGKTFNNTSNLRTHQRIHTGEKPYKCSECGKSFSRSSNRIRHERIHLEEKHYKCPKCQESFRRRSDLTTHQQDHLGKRPYRCDICGKSFSQSATLAVHHRTHLEPAPYICCECGKSFSNSSSFGVHHRTHTGERPYECTECGRTFSDISNFGAHQRTHRGEKPYRCTVCGKHFSRSSNLIRHQKTHLGEQAGKDSS

SEQ ID NO: 14458 - protein, 306 aa, Homo Sapiens; identical to SEQ ID NO: 14457

SEQ ID NO: 14459 - protein, 133 aa, Homo Sapiens
MAQISSGGGGQSRCLLFALVLAICVHSQGSEMGSEKEQSPEPHLPEEGEGGKPWRVDDSEGSWIPPGEKEHGQESLSDELQETHPKKPWQKVTVRARELGDPIAHPRHEADEKPFICAQCGKTFNNTSNLRTH

SEQ ID NO: 14460 - protein, 284 aa, Homo Sapiens
MGSEKEQSPEPHLPEEGEGGKPWRVDDSEGSWIPPGEKEHGQESLSDELQETHPKKPWQKVTVRARELGDPIAHPRHEADEKPFICAQCGKTFNNTSNLRTHQRIHTGEKPYKCSECGKSFSRSSNRIRHERIHLEEKHYKCPKCQESFRRRSDLTTHQQDHLGKRPYRCDICGKSFSQSATLAVHHRTHLEPAPYICCECGKSFSNSSSFGVHHRTHTGERPYECTECGRTFSDISNFGAHQRTHRGEKPYRCTVCGKHFSRSSNLIRHQKTHLGEQAGKDSS

SEQ ID NO: 14461 - protein, 284 aa, Homo Sapiens; identical to SEQ ID NO: 14460

SEQ ID NO: 14462 - protein, 284 aa, Homo Sapiens; identical to SEQ ID NO: 14460

SEQ ID NO: 14463 - protein, 315 aa, Homo Sapiens
MSLCSPTHSAEMSLFLQGPEEMLPLSSEGSEMGSEKEQSPEPHLPEEGEGGKPWRVDDSEGSWIPPGEKEHGQESLSDELQETHPKKPWQKVTVRARELGDPIAHPRHEADEKPFICAQCGKTFNNTSNLRTHQRIHTGEKPYKCSECGKSFSRSSNRIRHERIHLEEKHYKCPKCQESFRRRSDLTTHQQDHLGKRPYRCDICGKSFSQSATLAVHHRTHLEPAPYICCECGKSFSNSSSFGVHHRTHTGERPYECTECGRTFSDISNFGAHQRTHRGEKPYRCTVCGKHFSRSSNLIRHQKTHLGEQAGKDSS

SEQ ID NO: 14464 - protein, 296 aa, Homo Sapiens
MSLCSPTHSAEMSLFLQGPEEMLPLSSEGSEMGSEKEQSPEPHLPEEGEGGKPWRVDDSEGSWIPPGEKEHGQESLSDELQETHPKKPWQKVTVRARELGDPIAHPRHEADEKPFICAQCGKTFNNTSNLRTHQRIHTGEKPYKCSECGKSFSRSSNRIRHERIHLEEKHYKCPKCQESFRRRSDLTTHQQDHLGKRPYRCDICGKSFSQSATLAVHHRTHLEPAPYICCECGKSFSNSSSFGVHHRTHTGERPYECTECGRTFSDISNFGAHQRTHRGEKPYRCTVCGKHFSRSS

SEQ ID NO: 14465 - protein, 130 aa, Homo Sapiens
MLENYRNLVFVGIAASKPDLITCLEQGKEPWNVKRHEMVTEPPVVYSYFAQDLWPKQGKKNYFQKVILRTYKKCGRENLQLRKYCKSMDECKVHKECYNGLNQCLTTTQNKIFQYDKYVKVFHKFSNSNR

SEQ ID NO: 14466 - protein, 87 aa, Homo Sapiens
MPGPLGSLEMGVLTFRDVALEFSLEEWQCLDTAQQNLYRNVMLENYRNLVFVGIAASKPDLITCLEQGKEPWNVKRHEMVTEPPGLQ

SEQ ID NO: 14467 - protein, 572 aa, Homo Sapiens
MPGPLGSLEMGVLTFRDVALEFSLEEWQCLDTAQQNLYRNVMLENYRNLVFVGIAASKPDLITCLEQGKEPWNVKRHEMVTEPPVVYSYFAQDLWPKQGKKNYFQKVILRTYKKCGRENLQLRKYCKSMDECKVHKECYNGLNQCLTTTQNKIFQYDKYVKVFHKFSNSNRHKIGHTGKKSFKCKECEKSFCMLSHLAQHKRIHSGEKPYKCKECGKAYNEASNLSTHKRIHTGKKPYKCEECGKAFNRLSHLTTHKIIHTGKKPYKCEECGKAFNQSANLTTHKRIHTGEKPYKCEECGRAFSQSSTLTAHKIIHAGEKPYKCEECGKAFSQSSTLTTHKIIHTGEKFYKCEECGKAFSRLSHLTTHKRIHSGEKPYKCEECGKAFKQSSTLTTHKRIHAGEKFYKCEVCSKAFSRFSHLTTHKRIHTGEKPYKCEECGKAFNLSSQLTTHKIIHTGEKPYKCEECGKAFNQSSTLSKHKVIHTGEKPYKCEECGKAFNQSSHLTTHKMIHTGEKPYKCEECGKAFNNSSILNRHKMIHTGEKLYKPESCNNACDNIAKISKYKRNCAGEK

SEQ ID NO: 14468 - protein, 131 aa, Homo Sapiens
MSEETLQSKLAAAKKKLPWGAVQGSRAMSDLLLLLLDLTLLLLLMLLGFAGYSGQLAGVAVSAGSPPIPTSSMWSPMVRLGGFSPELQHLPQTLLHRCPLGQPCMGVLTFRDVALEFSLEEWQCLDTAQQN

SEQ ID NO: 14469 - protein, 75 aa, Homo Sapiens
MEAFALGPARRGRRRTRAAGSLLSRAAILLFISAFLVRVPSSGEGPRRPAGSAGTTAASPTLRIAFSCVTCIRFI

SEQ ID NO: 14470 - protein, 350 aa, Homo Sapiens
MEAFALGPARRGRRRTRAAGSLLSRAAILLFISAFLVRVPSSVGHLVRLPRAFRLTKDSVKIVGSTSFPVKAYVMLHQKSPHVLCVTQQLRNAELIDPSFQWYGPKGKVVSENRTAQITSTGSLVFQNFEESMSGIYTCFLEYKPTVEEIVKRLQLKYAIYAYREPHYYYQFTARYHAAPCNSIYNISFEKKLLQILSKLLLDLSCEISLLKSECHRVKMQRAGLQNELFFAFSVSSLDTEKGPKRCTDHNCEPYKRLFKAKNLIERFFNQQVEILGRRAEQLPQIYYIEGTLQMVWINRCFPGYGMNVQQHPKCPECCVICSPGSYNPRDGIHCLQCNSSLVYGAKTCL

SEQ ID NO: 14471 - protein, 351 aa, Homo Sapiens
MEAFALGPARRGRRRTRAAGSLLSRAAILLFISAFLVRVPSSVGHLVRLPRAFRLTKDSVKIVGSTSFPVKAYVMLHQKSPHVLCVTQQLRNAELIDPSFQWYGPKGKVVSVENRTAQITSTGSLVFQNFEESMSGIYTCFLEYKPTVEEIVKRLQLKYAIYAYREPHYYYQFTARYHAAPCNSIYNISFEKKLLQILSKLLLDLSCEISLLKSECHRVKMQRAGLQNELFFAFSVSSLDTEKGPKRCTDHNCEPYKRLFKAKNLIERFFNQQVEILGRRAEQLPQIYYIEGTLQMVWINRCFPGYGMNVQQHPKCPECCVICSPGSYNPRDGIHCLQCNSSLVYGAKTCL

SEQ ID NO: 14472 - protein, 72 aa, Homo Sapiens
MFLVGHLVRLPRAFRLTKDSVKIVGSTSFPVKAYVMLHQKSPHVLCVTQQLRNAELIDPSFQWYGPKGKVVS

SEQ ID NO: 14473 - protein, 218 aa, Homo Sapiens
MMRTCVLLSAVLWCLTGAYREPDYSYQMAVRFTTRSCIGRYNDVFFRVLKKILDSLISDLSCHVIEPSYKCHSVEIPEHGLIHELFIAFQVNPFAPGWKGACNGSVDCEDTTNHNILQARDRIEDFFRSQAYIFYHNFNKTLPAMHFVDHSLQVVRLDSCRPGFGKNERLHSNCASCCVVCSPATFSPDVNVTCQTCVSVLTYGAKSCPQTSNKNQQY

SEQ ID NO: 14474 - protein, 316 aa, Homo Sapiens
MMRTCVLLSAVLWCLTGDKIYVELHQNSPVLICMDFKLSKKEIVDPTYLWIGPNEKTLTGNNRINITETGQLMVKDFLEPLSGLYTCTLSYKTVKAETQEEKTVKKRYDFMVFAYREPDYSYQMAVRFTTRSCIGRYNDVFFRVLKKILDSLISDLSCHVIEPSYKCHSVEIPEHGLIHELFIAFQVNPFAPGWKGACNGSVDCEDTTNHNILQARDRIEDFFRSQAYIFYHNFNKTLPAMHFVDHSLQVVRLDSCRPGFGKNERLHSNCASCCVVCSPATFSPDVNVTCQTCVSVLTYGAKSCPQTSNKNQQYED

SEQ ID NO: 14475 - protein, 338 aa, Homo Sapiens
MMRTCVLLSAVLWCLTGVQCPRFTLFNKKGFIYGKTGQPDKIYVELHQNSPVLICMDFKLSKKEIVDPTYLWIGPNEKTLTGNNRINITETGQLMVKDFLEPLSGLYTCTLSYKTVKAETQEEKTVKKRYDFMVFAYREPDYSYQMAVRFTTRSCIGRYNDVFFRVLKKILDSLISDLSCHVIEPSYKCHSVEIPEHGLIHELFIAFQVNPFAPGWKGACNGSVDCEDTTNHNILQARDRIEDFFRSQAYIFYHNFNKTLPAMHFVDHSLQVVRLDSCRPGFGKNERLHSNCASCCVVCSPATFSPDVNVTCQTCVSVLTYGAKSCPQTSNKNQQYED

SEQ ID NO: 14476 - protein, 265 aa, Homo Sapiens
MMRTCVLLSAVLWCLTGVQCPRFTLFNKKGFIYGKTGQPDKIYVELHQNSPVLICMDFKLSKKEIVDPTYLWIGPNEKTLTGNNRINITETGQLMVKDFLEPLSGLYTCTLSYKTVKAETQEEKTVKKRYDFMVFVNPFAPGWKGACNGSVDCEDTTNHNILQARDRIEDFFRSQAYIFYHNFNKTLPAMHFVDHSLQVVRLDSCRPGFGKNERLHSNCASCCVVCSPATFSPDVNVTCQTCVSVLTYGAKSCPQTSNKNQQYED

SEQ ID NO: 14477 - protein, 330 aa, Homo Sapiens
EQCPENGEEAVTLVEDLEREPGRPRSSVTVSVKGQEVRLEKMTPPKSSQELLSVRQESVEPQPRGVPKKERARSPDLGPQEQMNPKEKLKPFQRSGLPFPKSGVVSRLEQGEPWIPDLLGSKEKELPSGSHIGDRRVHADLLPSKKDRRSWVEQDHWSFEDEKVAGVHWGYEETRTLLAILSQTEFYEALRNCHRNSQVYGAVAERLREYGFLRTLEQCRTKFKGLQKSYRKVKSGHPPETCPFFEEMEALMSAQVIALPSNGLEAAASHSGLVGSDAETEEPGQRGWQHEEGAEEAVAQESDSDDMDLEATPQDPNSAAPVVFRSPGGA

SEQ ID NO: 14478 - protein, 462 aa, Homo Sapiens
MAKSALRENGTNSETFRQRFRRFHYQEVAGPREAFSQLWELCCRWLRPEVRTKEQIVELLVLEQFLTVLPGEIQNWVQEQCPENGEEAVTLVEDLEREPGRPRSSVTVSVKGQEVRLEKMTPPKSSQELLSVRQESVEPQPRGVPKKERARSPDLGPQEQMNPKEKLKPFQRSGFEAGFENEDNSKRDISEEVQLHRTLLARSERKIPRYLHQGKGNESDCRSGRQWAKTSGEKRGKLTLPEKSLSEVLSQQRPCLGERPYKYLKYSKSFGPNSLLMHQVSHQVENPYKCADCGKSFSRSARLIRHRRIHTGEKPYKCLDCGKSFRDSSNFITHRRIHTGEKPYQCGECGKCFNQSSSLIIHQRTHTGEKPYQCEECGKSFNNSSHFSAHRRIHTGERPHVCPDCGKSFSKSSDLRAHHRTHTGEKPYGCHDCGKCFSKSSALNKHGEIHAREKLLTQSAPK

SEQ ID NO: 14479 - protein, 556 aa, Homo Sapiens
MAKSALRENGTNSETFRQRFRRFHYQEVAGPREAFSQLWELCCRWLRPEVRTKEQIVELLVLEQFLTVLPGEIQNWVQEQCPENGEEAVTLVEDLEREPGRPRSSVTVSVKGQEVRLEKMTPPKSSQELLSVRQESVEPQPRGVPKKERARSPDLGPQEQMNPKEKLKPFQRSGLPFPKSGVVSRLEQGEPWIPDLLGSKEKELPSGSHIGDRRVHADLLPSKKDRRSWVEQDHWSFEDEKVAGVHWGYEETRTLLAILSQTEFYEALRNCHRNSQVYGAVAERLREYGFLRTLEQCRTKFKGLQKSYRKVKSGHPPETCPFFEEMEALMSAQVIALPSNGLEAAASHSGLVGSDAETEEPGQRGWQHEEGAEEAVAQESDSDDMDLEATPQDPNSAAPVVFRSPGGVHWGYEETKTYLAILSETQFYEALRNCHRNSQLYGAVAERLWEYGFLRTPEQCRTKFKSLQTSYRKVKNGQAPETCPFFEEMDALVLKLDLRMKIIQNGIFLRKYNCIGHYLQDLKGKFPGIFIRVKAMRVTVDQEDSGQRPQGRKEEN

SEQ ID NO: 14480 - protein, 21 aa, Homo Sapiens
MMAKSALRENGTNSETFRQRF

SEQ ID NO: 14481 - protein, 852 aa, Homo Sapiens
MMAKSALRENGTNSETFRQRFRRFHYQEVAGPREAFSQLWELCCRWLRPEVRTKEQIVELLVLEQFLTVLPGEIQNWVQEQCPENGEEAVTLVEDLEREPGRPRSSVTVSVKGQEVRLEKMTPPKSSQELLSVRQESVEPQPRGVPKKERARSPDLGPQEQMNPKEKLKPFQRSGLPFPKSGVVSRLEQGEPWIPDLLGSKEKELPSGSHIGDRRVHADLLPSKKDRRSWVEQDHWSFEDEKVAGVHWGYEETRTLLAILSQTEFYEALRNCHRNSQVYGAVAERLREYGFLRTLEQCRTKFKGLQKSYRKVKSGHPPETCPFFEEMEALMSAQVIALPSNGLEAAASHSGLVGSDAETEEPGQRGWQHEEGAEEAVAQESDSDDMDLEATPQDPNSAAPVVFRSPGGVHWGYEETKTYLAILSETQFYEALRNCHRNSQLYGAVAERLWEYGFLRTPEQCRTKFKSLQTSYRKVKNGQAPETCPFFEEMDALVSVRVAAPPNDGQEETASCPVQGTSEAEAQKQAEEADEATEEDSDDDEEDTEIPPGAVITRAPVLFQSPRGFEAGFENEDNSKRDISEEVQLHRTLLARSERKIPRYLHQGKGNESDCRSGRQWAKTSGEKRGKLTLPEKSLSEVLSQQRPCLGERPYKYLKYSKSFGPNSLLMHQVSHQVENPYKCADCGKSFSRSARLIRHRRIHTGEKPYKCLDCGKSFRDSSNFITHRRIHTGEKPYQCGECGKCFNQSSSLIIHQRTHTGEKPYQCEECGKSFNNSSHFSAHRRIHTGERPHVCPDCGKSFSKSSDLRAHHRTHTGEKPYGCHDCGKCFSKSSALNKHGEIHAREKLLTQSAPK

SEQ ID NO: 14482 - protein, 199 aa, Homo Sapiens
MMAKSALRENGTNSETFRQRFRRFHYQEVAGPREAFSQLWELCCRWLRPEVRTKEQIVELLVLEQFLTVLPGEIQNWVQEQCPENGEEAVTLVEDLEREPGRPRSSVTVSVKGQEVRLEKMTPPKSSQELLSVRQESVEPQPRGVPKKERARSPDLGPQEQMNPKEKLKPFQRSGWSKESHGSQICWALRRKNFQVAAT

SEQ ID NO: 14483 - protein, 316 aa, Homo Sapiens
MSRKWRGGSDSRGRFRKRAWKTIFGHSLCEGAGSALGEDDTPEIITRVIKCSAGVSGTPAQGCTQEREGKKPRPGTTGADEPKGEAQTFSKERLEQGEPWIPDLLGSKEKELPSGSHIGDRRVHADLLPSKKDRRSWVEQDHWSFEDEKVAGVHWGYEETRTLLAILSQTEFYEALRNCHRNSQVYGAVAERLREYGFLRTLEQCRTKFKGLQKSYRKVKSGHPPETCPFFEEMEALMSAQVIALPSNGLEAAASHSGLVGSDAETEEPGQRGWQHEEGAEEAVAQESDSDDMDLEATPQDPNSAAPVVFRSPGGA

SEQ ID NO: 14484 - protein, 594 aa, Artificial Sequence
  piggyBac transposase
MGSSLDDEHILSALLQSDDELVGEDSDSEVSDHVSEDDVQSDTEEAFIDEVHEVQPTSSGSEILDEQNVIEQPGSSLASNRILTLPQRTIRGKNKHCWSTSKSTRRSRVSALNIVRSQRGPTRMCRNIYDPLLCFKLFFTDEIISEIVKWTNAEISLKRRESMTSATFRDTNEDEIYAFFGILVMTAVRKDNHMSTDDLFDRSLSMVYVSVMSRDRFDFLIRCLRMDDKSIRPTLRENDVFTPVRKIWDLFIHQCIQNYTPGAHLTIDEQLLGFRGRCPFRVYIPNKPSKYGIKILMMCDSGTKYMINGMPYLGRGTQTNGVPLGEYYVKELSKPVHGSCRNITCDNWFTSIPLAKNLLQEPYKLTIVGTVRSNKREIPEVLKNSRSRPVGTSMFCFDGPLTLVSYKPKPAKMVYLLSSCDEDASINESTGKPQMVMYYNQTKGGVDTLDQMCSVMTCSRKTNRWPMALLYGMINIACINSFIIYSHNVSSKGEKVQSRKKFMRNLYMSLTSSFMRKRLEAPTLKRYLRDNISNILPKEVPGTSDDSTEEPVMKKRTYCTYCPSKIRRKANASCKKCKKVICREHNIDMCQSCF

SEQ ID NO: 14485 - protein, 340 aa, Artificial Sequence
  Sleeping Beauty transposase
MGKSKEISQDLRKKIVDLHKSGSSLGAISKRLKVPRSSVQTIVRKYKHHGTTQPSYRSGRRRVLSPRDERTLVRKVQINPRTTAKDLVKMLEETGTKVSISTVKRVLYRHNLKGRSARKKPLLQNRHKKARLRFATAHGDKDRTFWRNVLWSDETKIELFGHNDHRYVWRKKGEACKPKNTIPTVKHGGGSIMLWGCFAAGGTGALHKIDGIMRKENYVDILKQHLKTSVRKLKLGRKWVFQMDNDPKHTSKVVAKWLKDNKVKVLEWPSQSPDLNPIENLWAELKKRVRARRPTNLTQLHQLCQEEWAKIHPTYCGKLVEGYPKRLTQVKQFKGNATKY

SEQ ID NO: 14486 - protein, 340 aa, Artificial Sequence
  sleeping beauty transposase
MGKSKEISQDLRKRIVDLHKSGSSLGAISKRLAVPRSSVQTIVRKYKHHGTTQPSYRSGRRRVLSPRDERTLVRKVQINPRTTAKDLVKMLEETGTKVSISTVKRVLYRHNLKGHSARKKPLLQNRHKKARLRFATAHGDKDRTFWRNVLWSDETKIELFGHNDHRYVWRKKGEACKPKNTIPTVKHGGGSIMLWGCFAAGGTGALHKIDGIMDAVQYVDILKQHLKTSVRKLKLGRKWVFQHDNDPKHTSKVVAKWLKDNKVKVLEWPSQSPDLNPIENLWAELKKRVRARRPTNLTQLHQLCQEEWAKIHPNYCGKLVEGYPKRLTQVKQFKGNATKY

SEQ ID NO: 14487 - protein, 594 aa, Artificial Sequence
  piggyBac transpoase
MGSSLDDEHILSALLQSDDELVGEDSDSEISDHVSEDDVQSDTEEAFIDEVHEVQPTSSGSEILDEQNVIEQPGSSLASNRILTLPQRTIRGKNKHCWSTSKSTRRSRVSALNIVRSQRGPTRMCRNIYDPLLCFKLFFTDEIISEIVKWTNAEISLKRRESMTGATFRDTNEDEIYAFFGILVMTAVRKDNHMSTDDLFDRSLSMVYVSVMSRDRFDFLIRCLRMDDKSIRPTLRENDVFTPVRKIWDLFIHQCIQNYTPGAHLTIDEQLLGFRGRCPFRMYIPNKPSKYGIKILMMCDSGTKYMINGMPYLGRGTQTNGVPLGEYYVKELSKPVHGSCRNITCDNWFTSIPLAKNLLQEPYKLTIVGTVRSNKREIPEVLKNSRSRPVGTSMFCFDGPLTLVSYKPKPAKMVYLLSSCDEDASINESTGKPQMVMYYNQTKGGVDTLDQMCSVMTCSRKTNRWPMALLYGMINIACINSFIIYSHNVSSKGEKVQSRKKFMRNLYMSLTSSFMRKRLEAPTLKRYLRDNISNILPNEVPGTSDDSTEEPVMKKRTYCTYCPSKIRRKANASCKKCKKVICREHNIDMCQSCF

SEQ ID NO: 14488 - protein, 89 aa, Homo sapiens
LPAPKNLVVSEVTEDSLRLSWTAPDAAFDSFLIQYQESEKVGEAINLTVPGSERSYDLTGLKPGTEYTVSIYGVKGGHRSNPLSAEFTT

SEQ ID NO: 14489 - protein, 90 aa, Homo sapiens
MLPAPKNLVVSEVTEDSLRLSWTAPDAAFDSFLIQYQESEKVGEAINLTVPGSERSYDLTGLKPGTEYTVSIYGVKGGHRSNPLSAEFTT

SEQ ID NO: 14490 - DNA, 270 bp, Artificial Sequence
  FN3 concensus sequence
atgctgcctgcaccaaagaacctggtggtgtctcatgtgacagaggatagtgccagactgtcatggactgctcccgacgcagccttcgatagttttatcatcgtgtaccgggagaacatcgaaaccggcgaggccattgtcctgacagtgccagggtccgaacgctcttatgacctgacagatctgaagcccggaactgagtactatgtgcagatcgccggcgtcaaaggaggcaatatcagcttccctctgtccgcaatcttcaccaca

SEQ ID NO: 14491 - protein, 4 aa, Artificial Sequence
  A-B loop
TEDS

SEQ ID NO: 14492 - protein, 7 aa, Artificial Sequence
  B-C loop
TAPDAAF

SEQ ID NO: 14493 - protein, 6 aa, Artificial Sequence
  C-D loop
SEKVGE

SEQ ID NO: 14494 - protein, 4 aa, Artificial Sequence
  D-E loop
GSER

SEQ ID NO: 14495 - protein, 5 aa, Artificial Sequence
  E-F loop
GLKPG

SEQ ID NO: 14496 - protein, 7 aa, Artificial Sequence
  F-G loop
KGGHRSN

SEQ ID NO: 14497 - protein, 1053 aa, Artificial Sequence
  small and inactivated Cas9
MKRNYILGLAIGITSVGYGIIDYETRDVIDAGVRLFKEANVENNEGRRSKRGARRLKRRRRHRIQRVKKLLFDYNLLTDHSELSGINPYEARVKGLSQKLSEEEFSAALLHLAKRRGVHNVNEVEEDTGNELSTKEQISRNSKALEEKYVAELQLERLKKDGEVRGSINRFKTSDYVKEAKQLLKVQKAYHQLDQSFIDTYIDLLETRRTYYEGPGEGSPFGWKDIKEWYEMLMGHCTYFPEELRSVKYAYNADLYNALNDLNNLVITRDENEKLEYYEKFQIIENVFKQKKKPTLKQIAKEILVNEEDIKGYRVTSTGKPEFTNLKVYHDIKDITARKEIIENAELLDQIAKILTIYQSSEDIQEELTNLNSELTQEEIEQISNLKGYTGTHNLSLKAINLILDELWHTNDNQIAIFNRLKLVPKKVDLSQQKEIPTTLVDDFILSPVVKRSFIQSIKVINAIIKKYGLPNDIIIELAREKNSKDAQKMINEMQKRNRQTNERIEEIIRTTGKENAKYLIEKIKLHDMQEGKCLYSLEAIPLEDLLNNPFNYEVDHIIPRSVSFDNSFNNKVLVKQEEASKKGNRTPFQYLSSSDSKISYETFKKHILNLAKGKGRISKTKKEYLLEERDINRFSVQKDFINRNLVDTRYATRGLMNLLRSYFRVNNLDVKVKSINGGFTSFLRRKWKFKKERNKGYKHHAEDALIIANADFIFKEWKKLDKAKKVMENQMFEEKQAESMPEIETEQEYKEIFITPHQIKHIKDFKDYKYSHRVDKKPNRELINDTLYSTRKDDKGNTLIVNNLNGLYDKDNDKLKKLINKSPEKLLMYHHDPQTYQKLKLIMEQYGDEKNPLYKYYEETGNYLTKYSKKDNGPVIKKIKYYGNKLNAHLDITDDYPNSRNKVVKLSLKPYRFDVYLDNGVYKFVTVKNLDVIKKENYYEVNSKCYEEAKKLKKISNQAEFIASFYNNDLIKINGELYRVIGVNNDLLNRIEVNMIDITYREYLENMNDKRPPRIIKTIASKTQSIKKYSTDILGNLYEVKSKKHPQIIKKG

SEQ ID NO: 14498 - protein, 1368 aa, Artificial Sequence
  inactivated cas9
  X (1)..(1): X can be any amino acid
XDKKYSIGLAIGTNSVGWAVITDEYKVPSKKFKVLGNTDRHSIKKNLIGALLFDSGETAEATRLKRTARRRYTRRKNRICYLQEIFSNEMAKVDDSFFHRLEESFLVEEDKKHERHPIFGNIVDEVAYHEKYPTIYHLRKKLVDSTDKADLRLIYLALAHMIKFRGHFLIEGDLNPDNSDVDKLFIQLVQTYNQLFEENPINASGVDAKAILSARLSKSRRLENLIAQLPGEKKNGLFGNLIALSLGLTPNFKSNFDLAEDAKLQLSKDTYDDDLDNLLAQIGDQYADLFLAAKNLSDAILLSDILRVNTEITKAPLSASMIKRYDEHHQDLTLLKALVRQQLPEKYKEIFFDQSKNGYAGYIDGGASQEEFYKFIKPILEKMDGTEELLVKLNREDLLRKQRTFDNGSIPHQIHLGELHAILRRQEDFYPFLKDNREKIEKILTFRIPYYVGPLARGNSRFAWMTRKSEETITPWNFEEVVDKGASAQSFIERMTNFDKNLPNEKVLPKHSLLYEYFTVYNELTKVKYVTEGMRKPAFLSGEQKKAIVDLLFKTNRKVTVKQLKEDYFKKIECFDSVEISGVEDRFNASLGTYHDLLKIIKDKDFLDNEENEDILEDIVLTLTLFEDREMIEERLKTYAHLFDDKVMKQLKRRRYTGWGRLSRKLINGIRDKQSGKTILDFLKSDGFANRNFMQLIHDDSLTFKEDIQKAQVSGQGDSLHEHIANLAGSPAIKKGILQTVKVVDELVKVMGRHKPENIVIEMARENQTTQKGQKNSRERMKRIEEGIKELGSQILKEHPVENTQLQNEKLYLYYLQNGRDMYVDQELDINRLSDYDVDAIVPQSFLKDDSIDNKVLTRSDKNRGKSDNVPSEEVVKKMKNYWRQLLNAKLITQRKFDNLTKAERGGLSELDKAGFIKRQLVETRQITKHVAQILDSRMNTKYDENDKLIREVKVITLKSKLVSDFRKDFQFYKVREINNYHHAHDAYLNAVVGTALIKKYPKLESEFVYGDYKVYDVRKMIAKSEQEIGKATAKYFFYSNIMNFFKTEITLANGEIRKRPLIETNGETGEIVWDKGRDFATVRKVLSMPQVNIVKKTEVQTGGFSKESILPKRNSDKLIARKKDWDPKKYGGFDSPTVAYSVLVVAKVEKGKSKKLKSVKELLGITIMERSSFEKNPIDFLEAKGYKEVKKDLIIKLPKYSLFELENGRKRMLASAGELQKGNELALPSKYVNFLYLASHYEKLKGSPEDNEQKQLFVEQHKHYLDEIIEQISEFSKRVILADANLDKVLSAYNKHRDKPIREQAENIIHLFTLTNLGAPAAFKYFDTTIDRKRYTSTKEVLDATLIHQSITGLYETRIDLSQLGGD

SEQ ID NO: 14499 - protein, 1368 aa, Artificial Sequence
  inactivated cas9
MDKKYSIGLAIGTNSVGWAVITDEYKVPSKKFKVLGNTDRHSIKKNLIGALLFDSGETAEATRLKRTARRRYTRRKNRICYLQEIFSNEMAKVDDSFFHRLEESFLVEEDKKHERHPIFGNIVDEVAYHEKYPTIYHLRKKLVDSTDKADLRLIYLALAHMIKFRGHFLIEGDLNPDNSDVDKLFIQLVQTYNQLFEENPINASGVDAKAILSARLSKSRRLENLIAQLPGEKKNGLFGNLIALSLGLTPNFKSNFDLAEDAKLQLSKDTYDDDLDNLLAQIGDQYADLFLAAKNLSDAILLSDILRVNTEITKAPLSASMIKRYDEHHQDLTLLKALVRQQLPEKYKEIFFDQSKNGYAGYIDGGASQEEFYKFIKPILEKMDGTEELLVKLNREDLLRKQRTFDNGSIPHQIHLGELHAILRRQEDFYPFLKDNREKIEKILTFRIPYYVGPLARGNSRFAWMTRKSEETITPWNFEEVVDKGASAQSFIERMTNFDKNLPNEKVLPKHSLLYEYFTVYNELTKVKYVTEGMRKPAFLSGEQKKAIVDLLFKTNRKVTVKQLKEDYFKKIECFDSVEISGVEDRFNASLGTYHDLLKIIKDKDFLDNEENEDILEDIVLTLTLFEDREMIEERLKTYAHLFDDKVMKQLKRRRYTGWGRLSRKLINGIRDKQSGKTILDFLKSDGFANRNFMQLIHDDSLTFKEDIQKAQVSGQGDSLHEHIANLAGSPAIKKGILQTVKVVDELVKVMGRHKPENIVIEMARENQTTQKGQKNSRERMKRIEEGIKELGSQILKEHPVENTQLQNEKLYLYYLQNGRDMYVDQELDINRLSDYDVDAIVPQSFLKDDSIDNKVLTRSDKNRGKSDNVPSEEVVKKMKNYWRQLLNAKLITQRKFDNLTKAERGGLSELDKAGFIKRQLVETRQITKHVAQILDSRMNTKYDENDKLIREVKVITLKSKLVSDFRKDFQFYKVREINNYHHAHDAYLNAVVGTALIKKYPKLESEFVYGDYKVYDVRKMIAKSEQEIGKATAKYFFYSNIMNFFKTEITLANGEIRKRPLIETNGETGEIVWDKGRDFATVRKVLSMPQVNIVKKTEVQTGGFSKESILPKRNSDKLIARKKDWDPKKYGGFDSPTVAYSVLVVAKVEKGKSKKLKSVKELLGITIMERSSFEKNPIDFLEAKGYKEVKKDLIIKLPKYSLFELENGRKRMLASAGELQKGNELALPSKYVNFLYLASHYEKLKGSPEDNEQKQLFVEQHKHYLDEIIEQISEFSKRVILADANLDKVLSAYNKHRDKPIREQAENIIHLFTLTNLGAPAAFKYFDTTIDRKRYTSTKEVLDATLIHQSITGLYETRIDLSQLGGD

SEQ ID NO: 14500 - DNA, 30 bp, Artificial Sequence
  Helraiser hairpin
gtgcacgaatttcgtgcaccgggccactag

SEQ ID NO: 14501 - protein, 1496 aa, Artificial Sequence
  Helitron transposase
MSKEQLLIQRSSAAERCRRYRQKMSAEQRASDLERRRRLQQNVSEEQLLEKRRSEAEKQRRHRQKMSKDQRAFEVERRRWRRQNMSREQSSTSTTNTGRNCLLSKNGVHEDAILEHSCGGMTVRCEFCLSLNFSDEKPSDGKFTRCCSKGKVCPNDIHFPDYPAYLKRLMTNEDSDSKNFMENIRSINSSFAFASMGANIASPSGYGPYCFRIHGQVYHRTGTLHPSDGVSRKFAQLYILDTAEATSKRLAMPENQGCSERLMININNLMHEINELTKSYKMLHEVEKEAQSEAAAKGIAPTEVTMAIKYDRNSDPGRYNSPRVTEVAVIFRNEDGEPPFERDLLIHCKPDPNNPNATKMKQISILFPTLDAMTYPILFPHGEKGWGTDIALRLRDNSVIDNNTRQNVRTRVTQMQYYGFHLSVRDTFNPILNAGKLTQQFIVDSYSKMEANRINFIKANQSKLRVEKYSGLMDYLKSRSENDNVPIGKMIILPSSFEGSPRNMQQRYQDAMAIVTKYGKPDLFITMTCNPKWADITNNLQRWQKVENRPDLVARVFNIKLNALLNDICKFHLFGKVIAKIHVIEFQKRGLPHAHILLILDSESKLRSEDDIDRIVKAEIPDEDQCPRLFQIVKSNMVHGPCGIQNPNSPCMENGKCSKGYPKEFQNATIGNIDGYPKYKRRSGSTMSIGNKVVDNTWIVPYNPYLCLKYNCHINVEVCASIKSVKYLFKYIYKGHDCANIQISEKNIINHDEVQDFIDSRYVSAPEAVWRLFAMRMHDQSHAITRLAIHLPNDQNLYFHTDDFAEVLDRAKRHNSTLMAWFLLNREDSDARNYYYWEIPQHYVFNNSLWTKRRKGGNKVLGRLFTVSFREPERYYLRLLLLHVKGAISFEDLRTVGGVTYDTFHEAAKHRGLLLDDTIWKDTIDDAIILNMPKQLRQLFAYICVFGCPSAADKLWDENKSHFIEDFCWKLHRREGACVNCEMHALNEIQEVFTLHGMKCSHFKLPDYPLLMNANTCDQLYEQQQAEVLINSLNDEQLAAFQTITSAIEDQTVHPKCFFLDGPGGSGKTYLYKVLTHYIRGRGGTVLPTASTGIAANLLLGGRTFHSQYKLPIPLNETSISRLDIKSEVAKTIKKAQLLIIDECTMASSHAINAIDRLLREIMNLNVAFGGKVLLLGGDFRQCLSIVPHAMRSAIVQTSLKYCNVWGCFRKLSLKTNMRSEDSAYSEWLVKLGDGKLDSSFHLGMDIIEIPHEMICNGSIIEATFGNSISIDNIKNISKRAILCPKNEHVQKLNEEILDILDGDFHTYLSDDSIDSTDDAEKENFPIEFLNSITPSGMPCHKLKLKVGAIIMLLRNLNSKWGLCNGTRFIIKRLRPNIIEAEVLTGSAEGEVVLIPRIDLSPSDTGLPFKLIRRQFPVMPAFAMTINKSQGQTLDRVGIFLPEPVFAHGQLYVAFSRVRRACDVKVKVVNTSSQGKLVKHSESVFTLNVVYREILE

SEQ ID NO: 14502 - protein, 649 aa, Oryzias latipes
MEEVCDSSAAASSTVQNQPQDQEHPWPYLREFFSLSGVNKDSFKMKCVLCLPLNKEISAFKSSPSNLRKHIERMHPNYLKNYSKLTAQKRKIGTSTHASSSKQLKVDSVFPVKHVSPVTVNKAILRYIIQGLHPFSTVDLPSFKELISTLQPGISVITRPTLRSKIAEAALIMKQKVTAAMSEVEWIATTTDCWTARRKSFIGVTAHWINPGSLERHSAALACKRLMGSHTFEVLASAMNDIHSEYEIRDKVVCTTTDSGSNFMKAFRVFGVENNDIETEARRCESDDTDSEGCGEGSDGVEFQDASRVLDQDDGFEFQLPKHQKCACHLLNLVSSVDAQKALSNEHYKKLYRSVFGKCQALWNKSSRSALAAEAVESESRLQLLRPNQTRWNSTFMAVDRILQICKEAGEGALRNICTSLEVPMFNPAEMLFLTEWANTMRPVAKVLDILQAETNTQLGWLLPSVHQLSLKLQRLHHSLRYCDPLVDALQQGIQTRFKHMFEDPEIIAAAILLPKFRTSWTNDETIIKRGMDYIRVHLEPLDHKKELANSSSDDEDFFASLKPTTHEASKELDGYLACVSDTRESLLTFPAICSLSIKTNTPLPASAACERLFSTAGLLFSPKRARLDTNNFENQLLLKLNLRFYNFE

SEQ ID NO: 14503 - protein, 199 aa, Artificial Sequence
  endonuclease domain
EGIKSNISLLKDELRGQISHISHEYLSLIDLAFDSKQNRLFEMKVLELLVNEYGFKGRHLGGSRKPDGIVYSTTLEDNFGIIVDTKAYSEGYSLPISQADEMERYVRENSNRDEEVNPNKWWENFSEEVKKYYFVFISGSFKGKFEEQLRRLSMTTGVNGSAVNVVNLLLGAEKIRSGEMTIEELERAMFNNSEFILKY

SEQ ID NO: 14504 - protein, 610 aa, Bombyx mori
MDIERQEERIRAMLEEELSDYSDESSSEDETDHCSEHEVNYDTEEERIDSVDVPSNSRQEEANAIIANESDSDPDDDLPLSLVRQRASASRQVSGPFYTSKDGTKWYKNCQRPNVRLRSENIVTEQAQVKNIARDASTEYECWNIFVTSDMLQEILTHTNSSIRHRQTKTAAENSSAETSFYMQETTLCELKALIALLYLAGLIKSNRQSLKDLWRTDGTGVDIFRTTMSLQRFQFLQNNIRFDDKSTRDERKQTDNMAAFRSIFDQFVQCCQNAYSPSEFLTIDEMLLSFRGRCLFRVYIPNKPAKYGIKILALVDAKNFDVVNLEVYAGKQPSGPYAVSNRPFEVVERLIQPVARSHRNVTFDNWFTGYELMLHLLNEYRLTSVGTVRKNKRQIPESFIRTDRQPNSSVFGFQKDITLVSYAPKKNKVVVVMSTMHHDNSIDESTGEKQKPEMITFYNSTKAGVDVVDELSANYNVSRNSKRWPMTLFYGVLNMAAINACIIYRANKNVTIKRTEFIRSLGLSMIYEHLHSRNKKKNIPTYLRQRIEKQLGEPSPRHVNVPGRYVRCQDCPYKKDRKTKHSCNACAKPICMEHAKFLCENCAELDSSL

SEQ ID NO: 14505 - protein, 610 aa, Bombyx mori
MDIERQEERIRAMLEEELSDYSDESSSEDETDHCSEHEVNYDTEEERIDSVDVPSNSRQEEANAIIANESDSDPDDDLPLSLVRQRASASRQVSGPFYTSKDGTKWYKNCQRPNVRLRSENIVTEQAQVKNIARDASTEYECWNIFVTSDMLQEILTHTNSSIRHRQTKTAAENSSAETSFYMQETTLCELKALIALLYLAGLIKSNRQSLKDLWRTDGTGVDIFRTTMSLQRFQFLQNNIRFDDKSTRDERKQTDNMAAFRSIFDQFVQCCQNAYSPSEFLTIDEMLLSFRGRCLFRVYIPNKPAKYGIKILALVDAKNFYVVNLEVYAGKQPSGPYAVSNRPFEVVERLIQPVARSHRNVTFDNWFTGYELMLHLLNEYRLTSVGTVRKNKRQIPESFIRTDRQPNSSVFGFQKDITLVSYAPKKNKVVVVMSTMHHDNSIDESTGEKQKPEMITFYNSTKAGVDVVDELCANYNVSRNSKRWPMTLFYGVLNMAAINACIIYRTNKNVTIKRTEFIRSLGLSMIYEHLHSRNKKKNIPTYLRQRIEKQLGEPSPRHVNVPGRYVRCQDCPYKKDRKTKRSCNACAKPICMEHAKFLCENCAELDSSL

SEQ ID NO: 14506 - DNA, 375 bp, Bombyx mori
ttatcccggcgagcatgaggcagggtatctcataccctggtaaaattttaaagttgtgtattttataaaattttcgtctgacaacactagcgcgctcagtagctggaggcaggagcgtgcgggaggggatagtggcgtgatcgcagtgtggcacgggacaccggcgagatattcgtgtgcaaacctgtttcgggtatgttataccctgcctcattgttgacgtattttttttatgtaatttttccgattattaatttcaactgttttattggtatttttatgttatccattgttctttttttatgatttactgtatcggttgtctttcgttcctttagttgagtttttttttattattttcagtttttgatcaaa

SEQ ID NO: 14507 - DNA, 368 bp, Bombyx mori
tcatatttttagtttaaaaaaataattatatgttttataatgaaaagaatctcattatctttcagtattaggttgatttatattccaaagaataatatttttgttaaattgttgatttttgtaaacctctaaatgtttgttgctaaaattactgtgtttaagaaaaagattaataaataataataatttcataattaaaaacttctttcattgaatgccattaaataaaccattattttacaaaataagatcaacataattgagtaaataataataagaacaatattatagtacaacaaaatatgggtatgtcataccctgccacattcttgatgtaactttttttcacctcatgctcgccgggttat

SEQ ID NO: 14508 - DNA, 214 bp, Bombyx mori
ttatcccggcgagcatgaggcagggtatctcataccctggtaaaattttaaagttgtgtattttataaaattttcgtctgacaacactagcgcgctcagtagctggaggcaggagcgtgcgggaggggatagtggcgtgatcgcagtgtggcacgggacaccggcgagatattcgtgtgcaaacctgtttcgggtatgttataccctgcctcat

SEQ ID NO: 14509 - DNA, 16 bp, Artificial Sequence
  transposon sequence
cccggcgagcatgagg

SEQ ID NO: 14510 - DNA, 16 bp, Artificial Sequence
  transposon sequence
cccggcgagcatgagg

SEQ ID NO: 14511 - DNA, 20 bp, Artificial Sequence
  transposon sequence
ttatcccggcgagcatgagg

SEQ ID NO: 14512 - DNA, 20 bp, Artificial Sequence
  transposon sequence
cctcatgctcgccgggttat

SEQ ID NO: 14513 - DNA, 20 bp, Artificial Sequence
  transposon sequence
ttaacccggcgagcatgagg

SEQ ID NO: 14514 - DNA, 20 bp, Artificial Sequence
  transposon sequence
cctcatgctcgccgggttaa

SEQ ID NO: 14515 - DNA, 375 bp, Bombyx mori
ttaacccggcgagcatgaggcagggtatctcataccctggtaaaattttaaagttgtgtattttataaaattttcgtctgacaacactagcgcgctcagtagctggaggcaggagcgtgcgggaggggatagtggcgtgatcgcagtgtggcacgggacaccggcgagatattcgtgtgcaaacctgtttcgggtatgttataccctgcctcattgttgacgtattttttttatgtaatttttccgattattaatttcaactgttttattggtatttttatgttatccattgttctttttttatgatttactgtatcggttgtctttcgttcctttagttgagtttttttttattattttcagtttttgatcaaa

SEQ ID NO: 14516 - DNA, 797 bp, Bombyx mori
tcatatttttagtttaaaaaaataattatatgttttataatgaaaagaatctcattatctttcagtattaggttgatttatattccaaagaataatatttttgttaaattgttgatttttgtaaacctctaaatgtttgttgctaaaattactgtgtttaagaaaaagattaataaataataataatttcataattaaaaacttctttcattgaatgccattaaataattcattattttacaaaataagatcaacataattgagtaaataataataagaacaatattatagtacaacaaaatatgggtatgtcataccctttttttttttttttttttttttttttcgggtagagggccgaacctcctacgaggtccccgcgcaaaaggggcgcgcggggtatgtgagactcaacgatctgcatggtgttgtgagcagaccgcgggcccaaggattttagagcccacccactaaacgactcctctgcactcttacacccgacgtccgatcccctccgaggtcagaacccggatgaggtaggggggctaccgcggtcaacactacaaccagacggcgcggctcaccccaaggacgcccagccgacggagccttcgaggcgaatcgaaggctctgaaacgtcggccgtctcggtacggcagcccgtcgggccgcccagacggtgccgctggtgtcccggaataccccgctggaccagaaccagcctgccgggtcgggacgcgatacaccgtcgaccggtcgctctaatcactccacggcagcgcgctagagtgctggta

SEQ ID NO: 14517 - protein, 589 aa, Xenopus tropicalis
MAKRFYSAEEAAAHCMASSSEEFSGSDSEYVPPASESDSSTEESWCSSSTVSALEEPMEVDEDVDDLEDQEAGDRADAAAGGEPAWGPPCNFPPEIPPFTTVPGVKVDTSNFEPINFFQLFMTEAILQDMVLYTNVYAEQYLTQNPLPRYARAHAWHPTDIAEMKRFVGLTLAMGLIKANSLESYWDTTTVLSIPVFSATMSRNRYQLLLRFLHFNNNATAVPPDQPGHDRLHKLRPLIDSLSERFAAVYTPCQNICIDESLLLFKGRLQFRQYIPSKRARYGIKFYKLCESSSGYTSYFLIYEGKDSKLDPPGCPPDLTVSGKIVWELISPLLGQGFHLYVDNFYSSIPLFTALYCLDTPACGTINRNRKGLPRALLDKKLNRGETYALRKNELLAIKFFDKKNVFMLTSIHDESVIREQRVGRPPKNKPLCSKEYSKYMGGVDRTDQLQHYYNATRKTRAWYKKVGIYLIQMALRNSYIVYKAAVPGPKLSYYKYQLQILPALLFGGVEEQTVPEMPPSDNVARLIGKHFIDTLPPTPGKQRPQKGCKVCRKRGIRRDTRYYCPKCPRNPGLCFKPCFEIYHTQLHY

SEQ ID NO: 14518 - protein, 589 aa, Artificial Sequence
  hyperactive transposase
MAKRFYSAEEAAAHCMAPSSEEFSGSDSEYVPPASESDSSTEESWCSSSTVSALEEPMEVDEDVDDLEDQEAGDRADAAAGGEPAWGPPCNFPPEIPPFTTVPGVKVDTSNFEPINFFQLFMTEAILQDMVLYTNVYAEQYLTQNPLPRYARAHAWHPTDIAEMKRFVGLTLAMGLIKANSLESYWNTTTVLSIPVFSATMSRNRYQLLLRFLHFNNNATAVPPDQPDHDRLHKLRPLIDSLSERFAAVYTPCQNICIDESLLLFKGRLRFRQYIPSKRARYGIKFYKLCESSSGYTSYFLIYEGKDSKLDPPGCPPDLTVSGKIVWELISPLLGQGFHLYVDNFYSSIPLFTALYCLDTPACGTINRTRKGLPRALLDKKLNRGETYALRKNELLAIKFFDKKNVFMLTSIHDESVIREQRVGRPPKNKPLCSKEYSKYMGGVDRTDQLQHYYNATRKTSAWYKKVGIYLIQMALRNSYIVYKAAVPGPKLSYYKYQLQILPALLFGGVEEQTVPEMLPSDNVARLIGKHFIDTLPPTPGKQRPQKGCKVCRKRGIRRDTRYYCPKCPRNPGLCFKPCFEIYHTQLHY

SEQ ID NO: 14519 - DNA, 185 bp, Xenopus tropicalis
ttaacctttttactgccaatgacgcatgggatacgtcgtggcagtaaaagggcttaaatgccaacgacgcgtcccatacgttgttggcattttaagtcttctctctgcagcggcagcatgtgccgccgctgcagagagtttctagcgatgacagcccctctgggcaacgagccgggggggctgtc

SEQ ID NO: 14520 - DNA, 237 bp, Xenopus tropicalis
tttgcatttttagacatttagaagcctatatcttgttacagaattggaattacacaaaaattctaccatattttgaaagcttaggttgttctgaaaaaaacaatatattgttttcctgggtaaactaaaagtcccctcgaggaaaggcccctaaagtgaaacagtgcaaaacgttcaaaaactgtctggcaatacaagttccactttgaccaaaacggctggcagtaaaagggttaa

SEQ ID NO: 14521 - DNA, 185 bp, Xenopus tropicalis
ttaaccctttgcctgccaatcacgcatgggatacgtcgtggcagtaaaagggcttaaatgccaacgacgcgtcccatacgttgttggcattttaagtcttctctctgcagcggcagcatgtgccgccgctgcagagagtttctagcgatgacagcccctctgggcaacgagccgggggggctgtc

SEQ ID NO: 14522 - DNA, 238 bp, Xenopus tropicalis
tttgcatttttagacatttagaagcctatatcttgttacagaattggaattacacaaaaattctaccatattttgaaagcttaggttgttctgaaaaaaacaatatattgttttcctgggtaaactaaaagtcccctcgaggaaaggcccctaaagtgaaacagtgcaaaacgttcaaaaactgtctggcaatacaagttccactttgggacaaatcggctggcagtgaaagggttaa

SEQ ID NO: 14523 - DNA, 185 bp, Xenopus tropicalis
ttaacctttttactgccaatgacgcatgggatacgtcgtggcagtaaaagggcttaaatgccaacgacgcgtcccatacgttgttggcattttaattcttctctctgcagcggcagcatgtgccgccgctgcagagagtttctagcgatgacagcccctctgggcaacgagccgggggggctgtc

SEQ ID NO: 14524 - DNA, 18 bp, Artificial Sequence
  transposon sequence
ttaacctttttactgcca

SEQ ID NO: 14525 - protein, 597 aa, Helicoverpa armigera
MASRQRLNHDEIATILENDDDYSPLDSESEKEDCVVEDDVWSDNEDAIVDFVEDTSAQEDPDNNIASRESPNLEVTSLTSHRIITLPQRSIRGKNNHVWSTTKGRTTGRTSAINIIRTNRGPTRMCRNIVDPLLCFQLFITDEIIHEIVKWTNVEIIVKRQNLKDISASYRDTNTMEIWALVGILTLTAVMKDNHLSTDELFDATFSGTRYVSVMSRERFEFLIRCIRMDDKTLRPTLRSDDAFLPVRKIWEIFINQCRQNHVPGSNLTVDEQLLGFRGRCPFRMYIPNKPDKYGIKFPMMCAAATKYMIDAIPYLGKSTKTNGLPLGEFYVKDLTKTVHGTNRNITCDNWFTSIPLAKNMLQAPYNLTIVGTIRSNKREMPEEIKNSRSRPVGSSMFCFDGPLTLVSYKPKPSKMVFLLSSCDENAVINESNGKPDMILFYNQTKGGVDSFDQMCKSMSANRKTNRWPMAVFYGMLNMAFVNSYIIYCHNKINKQEKPISRKEFMKKLSIQLTTPWMQERLQAPTLKRTLRDNITNVLKNVVPASSENISNEPEPKKRRYCGVCSYKKRRMTKAQCCKCKKAICGEHNIDVCQDCI

SEQ ID NO: 14526 - DNA, 18 bp, Artificial Sequence
  transposon sequence
ttaaccctttgcctgcca

SEQ ID NO: 14527 - DNA, 18 bp, Artificial Sequence
  transposon sequence
ttaaccyttttactgcca

SEQ ID NO: 14528 - DNA, 367 bp, Helicoverpa armigera
agactgtttttttctaagagacttctaaaatattattacgagttgatttaattttatgaaaacatttaaaactagttgattttttttataattacataattttaagaaaaagtgttagaggcttgatttttttgttgattttttctaagatttgattaaagtgccataatagtattaataaagagtattttttaacttaaaatgtattttatttattaattaaaacttcaattatgataactcatgcaaaaatatagttcattaacagaaaaaaataggaaaactttgaagttttgtttttacacgtcatttttacgtatgattgggctttatagctagttaaatatgattgggcttctagggttaa

SEQ ID NO: 14529 - DNA, 18 bp, Artificial Sequence
  transposon sequence
tggcagtaaaagggttaa

SEQ ID NO: 14530 - protein, 628 aa, Pectinophora gossypiella
MDLRKQDEKIRQWLEQDIEEDSKGESDNSSSETEDIVEMEVHKNTSSESEVSSESDYEPVCPSKRQRTQIIESEESDNSESIRPSRRQTSRVIDSDETDEDVMSSTPQNIPRNPNVIQPSSRFLYGKNKHKWSSAAKPSSVRTSRRNIIHFIPGPKERAREVSEPIDIFSLFISEDMLQQVVTFTNAEMLIRKNKYKTETFTVSPTNLEEIRALLGLLFNAAAMKSNHLPTRMLFNTHRSGTIFKACMSAERLNFLIKCLRFDDKLTRNVRQRDDRFAPIRDLWQALISNFQKWYTPGSYITVDEQLVGFRGRCSFRMYIPNKPNKYGIKLVMAADVNSKYIVNAIPYLGKGTDPQNQPLATFFIKEITSTLHGTNRNITMDNWFTSVPLANELLMAPYNLTLVGTLRSNKREIPEKLKNSKSRAIGTSMFCYDGDKTLVSYKAKSNKVVFILSTIHDQPDINQETGKPEMIHFYNSTKGAVDTVDQMCSSISTNRKTQRWPLCVFYNMLNLSIINAYVVYVYNNVRNNKKPMSRRDFVIKLGDQLMEPWLRQRLQTVTLRRDIKVMIQDILGESSDLEAPVPSVSNVRKIYYLCPSKARRMTKHRCIKCKQAICGPHNIDICSRCIE

SEQ ID NO: 14531 - DNA, 18 bp, Artificial Sequence
  transposon sequence
tggcagtgaaagggttaa

SEQ ID NO: 14532 - DNA, 406 bp, Pectinophora gossypiella
ttaaccctagataactaaacattcgtccgctcgacgacgcgctatgccgcgaaattgaagtttacctattattccgcgtcccccgcccccgccgctttttctagcttcctgatttgcaaaatagtgcatcgcgtgacacgctcgaggtcacacgacaattaggtcgaaagttacaggaatttcgtcgtccgctcgacgaaagtttagtaattacgtaagtttggcaaaggtaagtgaatgaagtatttttttataattattttttaattctttatagtgataacgtaaggtttatttaaatttattacttttatagttatttagccaattgttataaattccttgttattgctgaaaaatttgcctgttttagtcaaaatttattaacttttcgatcgttttttag

SEQ ID NO: 14533 - DNA, 18 bp, Artificial Sequence
  transposon sequence
ttaaccytttkmctgcca

SEQ ID NO: 14534 - protein, 599 aa, Ctenoplusia agnata
MASRQHLYQDEIAAILENEDDYSPHDTDSEMEDCVTQDDVRSDVEDEMVDNIGNGTSPASRHEDPETPDPSSEASNLEVTLSSHRIIILPQRSIREKNNHIWSTTKGQSSGRTAAINIVRTNRGPTRMCRNIVDPLLCFQLFIKEEIVEEIVKWTNVEMVQKRVNLKDISASYRDTNEMEIWAIISMLTLSAVMKDNHLSTDELFNVSYGTRYVSVMSRERFEFLLRLLRMGDKLLRPNLRQEDAFTPVRKIWEIFINQCRLNYVPGTNLTVDEQLLGFRGRCPFRMYIPNKPDKYGIKFPMVCDAATKYMVDAIPYLGKSTKTQGLPLGEFYVKELTQTVHGTNRNVTCDNWFTSVPLAKSLLNSPYNLTLVGTIRSNKREIPEEVKNSRSRQVGSSMFCFDGPLTLVSYKPKPSKMVFLLSSCNEDAVVNQSNGKPDMILFYNQTKGGVDSFDQMCSSMSTNRKTNRWPMAVFYGMLNMAFVNSYIIYCHNMLAKKEKPLSRKDFMKKLSTDLTTPSMQKRLEAPTLKRSLRDNITNVLKIVPQAAIDTSFDEPEPKKRRYCGFCSYKKKRMTKTQCFKCKKPVCGEHNIDVCQDCI

SEQ ID NO: 14535 - DNA, 326 bp, Ctenoplusia agnata
ttaaccctagaagcccaatctacgtcattctgacgtgtatgtcgccgaaaatactctgtctctttctcctgcacgatcggattgccgcgaacgctcgattcaacccagttggcgccgagatctattggaggactgcggcgttgattcggtaagtcccgccattttgtcatagtaacagtattgcacgtcagcttgacgtatatttgggctttgtgttatttttgtaaattttcaacgttagtttattattgcatctttttgttacattactggtttatttgcatgtattactcaaatattatttttattttagcgtagaaaataca

SEQ ID NO: 14536 - DNA, 370 bp, Ctenoplusia agnata
agactgttttttttgtatttgcattatatattatattctaaagttgatttaattctaagaaaaacattaaaataagtttctttttgtaaaatttaattaattataagaaaaagtttaagttgatctcattttttataaaaatttgcaatgtttccaaagttattattgtaaaagaataaataaaagtaaactgagttttaattgatgttttattatatcattatactatatattacttaaataaaacaataactgaatgtatttctaaaaggaatcactagaaaatatagtgatcaaaaatttacacgtcatttttgcgtatgattgggctttataggttctaaaaatatgattgggcctctagggttaa

SEQ ID NO: 14537 - protein, 597 aa, Agrotis ipsilon
MESRQRLNQDEIATILENDDDYSPLDSDSEAEDRVVEDDVWSDNEDAMIDYVEDTSRQEDPDNNIASQESANLEVTSLTSHRIISLPQRSICGKNNHVWSTTKGRTTGRTSAINIIRTNRGPTRMCRNIVDPLLCFQLFITDEIIHEIVKWTNVEMIVKRQNLIDISASYRDTNTMEMWALVGILTLTAVMKDNHLSTDELFDATFSGTRYVSVMSRERFEFLIRCMRMDDKTLRPTLRSDDAFIPVRKLWEIFINQCRLNYVPGGNLTVDEQLLGFRGRCPFRMYIPNKPDKYGIRFPMMCDAATKYMIDAIPYLGKSTKTNGLPLGEFYVKELTKTVHGTNRNVTCDNWFTSIPLAKNMLQAPYNLTIVGTIRSNKREIPEEIKNSRSRPVGSSMFCFDGPLTLVSYKPKPSRMVFLLSSCDENAVINESNGKPDMILFYNQTKGGVDSFDQMCKSMSANRKTNRWPMAVFYGMLNMAFVNSYIIYCHNKINKQKKPINRKEFMKNLSTDLTTPWMQERLKAPTLKRTLRDNITNVLKNVVPPSPANNSEEPGPKKRSYCGFCSYKKRRMTKTQFYKCKKAICGEHNIDVCQDCV

SEQ ID NO: 14538 - DNA, 323 bp, Agrotis ipsilon
ttaaccctagaagcccaatctacgtaaatttgacgtataccgcggcgaaatatatctgtctctttcacgtttaccgtcggattcccgctaacttcggaaccaactcagtagccattgagaactcccaggacacagttgcgtcatctcggtaagtgccgccattttgttgtaatagacaggttgcacgtcattttgacgtataattgggctttgtgtaacttttgaaattatttataatttttattgatgtgatttatttgagttaatcgtattgtttcgttacatttttcatatgatattaatattttcagattgaatataaa

SEQ ID NO: 14539 - DNA, 367 bp, Agrotis ipsilon
agactgttttttttaaaaggcttataaagtattactattgcgtgatttaattttataaaaatatttaaaaccagttgatttttttaataattacctaattttaagaaaaaatgttagaagcttgatatttttgttgatttttttctaagatttgattaaaaggccataattgtattaataaagagtatttttaacttcaaatttattttatttattaattaaaacttcaattatgataatacatgcaaaaatatagttcatcaacagaaaaatataggaaaactctaatagttttatttttacacgtcatttttacgtatgattgggctttatagctagtcaaatatgattgggcttctagggttaa

SEQ ID NO: 14540 - protein, 520 aa, Megachila rotundata
MNGKDSLGEFYLDDLSDCLDCRSASSTDDESDSSNIAIRKRCPIPLIYSDSEDEDMNNNVEDNNHFVKESNRYHYQIVEKYKITSKTKKWKDVTVTEMKKFLGLIILMGQVKKDVLYDYWSTDPSIETPFFSKVMSRNRFLQIMQSWHFYNNNDISPNSHRLVKIQPVIDYFKEKFNNVYKSDQQLSLDECLIPWRGRLSIKTYNPAKITKYGILVRVLSEARTGYVSNFCVYAADGKKIEETVLSVIGPYKNMWHHVYQDNYYNSVNIAKIFLKNKLRVCGTIRKNRSLPQILQTVKLSRGQHQFLRNGHTLLEVWNNGKRNVNMISTIHSAQMAESRNRSRTSDCPIQKPISIIDYNKYMKGVDRADQYLSYYSIFRKTKKWTKRVVMFFINCALFNSFKVYTTLNGQKITYKNFLHKAALSLIEDCGTEEQGTDLPNSEPTTTRTTSRVDHPGRLENFGKHKLVNIVTSGQCKKPLRQCRVCASKKKLSRTGFACKYCNVPLHKGDCFERYHSLKKY

SEQ ID NO: 14541 - DNA, 246 bp, Megachile rotundata
ttaaataatgcccactctagatgaacttaacactttaccgaccggccgtcgattattcgacgtttgctccccagcgcttaccgaccggccatcgattattcgacgtttgcttcccagcgcttaccgaccggtcatcgacttttgatctttccgttagatttggttaggtcagattgacaagtagcaagcatttcgcattctttattcaaataatcggtgcttttttctaagctttagcccttagaa

SEQ ID NO: 14542 - DNA, 244 bp, Megachile rotundata
acaacttcttttttcaacaaatattgttatatggattatttatttatttatttatttatggtatattttatgtttatttatttatggttattatggtatattttatgtaaataataaactgaaaacgattgtaatagatgaaataaatattgttttaacactaatataattaaagtaaaagattttaataaatttcgttaccctacaataacacgaagcgtacaattttaccagagtttattaa

SEQ ID NO: 14543 - protein, 570 aa, Bombus impatiens
MNEKNGIGEFYLDDLSDCPDSYSRSNSGDESDGSDTIIRKRGSVLPPRYSDSEDDEINNVEDNANNVENNDDIWSTNDEAIILEPFEGSPGLKIMPSSAESVTDNVNLFFGDDFFEHLVRESNRYHYQVMEKYKIPSKAKKWTDITVPEMKKFLGLIVLMGQIKKDVLYDYWSTDPSIETPFFSQVMSRNRFVQIMQSWHFCNNDNIPHDSHRLAKIQPVIDYFRRKFNDVYKPCQQLSLDESIIPWRGRLSIKTYNPAKITKYGILVRVLSEAVTGYVCNFDVYAADGKKLEDTAVIEPYKNIWHQIYQDNYYNSVKMARILLKNKVRVCGTIRKNRGLPRSLKTIQLSRGQYEFRRNHQILLEVWNNGRRNVNMISTIHSAQLMESRSKSKRSDVPIQKPNSIIDYNKYMKGVDRADQYLAYYSIFRKTKKWTKRVVMFFINCALFNSFRVYTILNGKNITYKNFLHKVAVSWIEDGETNCTEQDDNLPNSEPTRRAPRLDHPGRLSNYGKHKLINIVTSGRSLKPQRQCRVCAVQKKRSRTCFVCKFCNVPLHKGDCFERYHTLKKY

SEQ ID NO: 14544 - DNA, 278 bp, Bombus impatiens
ttaattttttaacattttaccgaccgatagccgattaatcgggtttttgccgctgacgcttaccgaccgataacctattaatcggctttttgtcgtcgaagcttaccaacctatagcctacctatagttaatcggttgccatggcgataaacaatctttctcattatatgagcagtaatttgttatttagtactaaggtaccttgctcagttgcgtcagttgcgttgctttgtaagctcccacagttttataccaattcgaaaaacttaccgttcgcg

SEQ ID NO: 14545 - DNA, 384 bp, Bombus impatiens
actatttcacatttgaactaaaaaccgttgtaatagataaaataaatataatttagtattaatattatggaaacaaaagattttattcaatttaattatcctatagtaacaaaaagcggccaattttatctgagcatacgaaaagcacagatactcccgcccgacagtctaaaccgaaacagagccggcgccagggagaatctgcgcctgagcagccggtcggacgtgcgtttgctgttgaaccgctagtggtcagtaaaccagaaccagtcagtaagccagtaactgatcagttaactagattgtatagttcaaattgaacttaatctagtttttaagcgtttgaatgttgtctaacttcgttatatattatattctttttaa

SEQ ID NO: 14546 - protein, 345 aa, Mamstra brassicae
MFSFVPNKEQTRTVLIFCFHLKTTAAESHRPLVEAFGEQVPTVKTCERWFQRFKSGDFDVDDKEHGKPPKRYEDAELQALLDEDDAQTQKQLAEQLEVSQQAVSNRLREGGKIQKVGRWVPHELNERQRERRKNTCEILLSRYKRKSFLHRIVTGEEKWIFFVNPKRKKSYVDPGQPATSTARPNRFGKKTRLCVWWDQSGVIYYELLKPGETVNTARYQQQLINLNRALQRKRPEYQKRQHRVIFLHDNAPSHTARAVRDTLETLNWEVLPHAAYSPDLAPSDYHLFASMGHALAEQRFDSYESVEEWLDEWFAAKDDEFYWRGIHKLPERWDNCVASDGKYFE

SEQ ID NO: 14547 - DNA, 174 bp, Mamestra brassicae
ttattgggttgcccaaaaagtaattgcggatttttcatatacctgtcttttaaacgtacatagggatcgaactcagtaaaactttgaccttgtgaaataacaaacttgactgtccaaccaccatagtttggcgcgaattgagcgtcataattgttttgactttttgcagtcaac

SEQ ID NO: 14548 - DNA, 79 bp, Mamestra brassicae
atgattttttctttttaaaccaattttaattagttaattgatataaaaatccgcaattactttttgggcaacccaataa

SEQ ID NO: 14549 - protein, 347 aa, Mayetolia desctructor
MENFENWRKRRHLREVLLGHFFAKKTAAESHRLLVEVYGEHALAKTQCFEWFQRFKSGDFDTEDKERPGQPKKFEDEELEALLDEDCCQTQEELAKSLGVTQQAISKRLKAAGYIQKQGNWVPHELKPRDVERRFCMSEMLLQRHKKKSFLSRIITGDEKWIHYDNSKRKKSYVKRGGRAKSTPKSNLHGAKVMLCIWWDQRGVLYYELLEPGQTITGDLYRTQLIRLKQALAEKRPEYAKRHGAVIFHHDNARPHVALPVKNYLENSGWEVLPHPPYSPDLAPSDYHLFRSMQNDLAGKRFTSEQGIRKWLDSFLAAKPAKFFEKGIHELSERWEKVIASDGQYFE

SEQ ID NO: 14550 - DNA, 267 bp, Mayetiola destructor
taagacttccaaaatttccacccgaactttaccttccccgcgcattatgtctctcttttcaccctctgatccctggtattgttgtcgagcacgatttatattgggtgtacaacttaaaaaccggaattggacgctagatgtccacactaacgaatagtgtaaaagcacaaatttcatatatacgtcattttgaaggtacatttgacagctatcaaaatcagtcaataaaactattctatctgtgtgcatcatatttttttattaact

SEQ ID NO: 14551 - DNA, 188 bp, Mayetiola destructor
tgcattcattcattttgttatcgaaataaagcattaattttcactaaaaaattccggtttttaagttgtacacccaatatcatccttagtgacaattttcaaatggctttcccattgagctgaaaccgtggctctagtaagaaaaacgcccaacccgtcatcatatgccttttttttctcaacatccg

SEQ ID NO: 14552 - protein, 342 aa, Apis mellifera
MENQKEHYRHILLFYFRKGKNASQAHKKLCAVYGDEALKERQCQNWFDKFRSGDFSLKDEKRSGRPVEVDDDLIKAIIDSDRHSTTREIAEKLHVSHTCIENHLKQLGYVQKLDTWVPHELKEKHLTQRINSCDLLKKRNENDPFLKRLITGDEKWVVYNNIKRKRSWSRPREPAQTTSKAGIHRKKVLLSVWWDYKGIVYFELLPPNRTINSVVYIEQLTKLNNAVEEKRPELTNRKGVVFHHDNARPHTSLVTRQKLLELGWDVLPHPPYSPDLAPSDYFLFRSLQNSLNGKNFNNDDDIKSYLIQFFANKNQKFYERGIMMLPERWQKVIDQNGQHITE

SEQ ID NO: 14553 - DNA, 184 bp, Apis mellifera
ttgggttggcaactaagtaattgcggatttcactcatagatggcttcagttgaatttttaggtttgctggcgtagtccaaatgtaaaacacattttgttatttgatagttggcaattcagctgtcaatcagtaaaaaaagttttttgatcggttgcgtagttttcgtttggcgttcgttgaaaa

SEQ ID NO: 14554 - DNA, 74 bp, Apis mellifera
agttatttagttccatgaaaaaattgtctttgattttctaaaaaaaatccgcaattacttagttgccaatccaa

SEQ ID NO: 14555 - protein, 345 aa, Messor bouvieri
MSSFVPENVHLRHALLFLFHQKKRAAESHRLLVETYGEHAPTIRTCETWFRQFKCGDFNVQDKERPGRPKTFEDAELQELLDEDSTQTQKQLAEKLNVSRVAICERLQAMGKIQKMGRWVPHELNDRQMENRKIVSEMLLQRYERKSFLHRIVTGDEKWIYFENPKRKKSWLSPGEAGPSTARPNRFGRKTMLCVWWDQIGVVYYELLKPGETVNTDRYRQQMINLNCALIEKRPQYAQRHDKVILQHDNAPSHTAKPVKEMLKSLGWEVLSHPPYSPDLAPSDYHLFASMGHALAEQHFADFEEVKKWLDEWFSSKEKLFFWNGIHKLSERWTKCIESNGQYFE

SEQ ID NO: 14556 - DNA, 242 bp, Messor bouvieri
agtcagaaatgacacctcgatcgacgactaatcgacgtctaatcgacgtcgattttatgtcaacatgttaccaggtgtgtcggtaattcctttccggtttttccggcagatgtcactagccataagtatgaaatgttatgatttgatacatatgtcattttattctactgacattaaccttaaaactacacaagttacgttccgccaaaataacagcgttatagatttataattttttgaaa

SEQ ID NO: 14557 - DNA, 146 bp, Messor bouvieri
ataaatttgaactatccattctaagtaacgtgttttctttaacgaaaaaaccggaaaagaattaccgacactcctggtatgtcaacatgttattttcgacattgaatcgcgtcgattcgaagtcgatcgaggtgtcatttctgact

SEQ ID NO: 14558 - protein, 594 aa, Trichoplusia ni; identical to SEQ ID NO: 14484

SEQ ID NO: 14559 - DNA, 313 bp, Trichoplusia ni
ttaaccctagaaagatagtctgcgtaaaattgacgcatgcattcttgaaatattgctctctctttctaaatagcgcgaatccgtcgctgtgcatttaggacatctcagtcgccgcttggagctcccgtgaggcgtgcttgtcaatgcggtaagtgtcactgattttgaactataacgaccgcgtgagtcaaaatgacgcatgattatcttttacgtgacttttaagatttaactcatacgataattatattgttatttcatgttctacttacgtgataacttattatatatatattttcttgttatagatatc

SEQ ID NO: 14560 - DNA, 235 bp, Trichoplusia ni
tttgttactttatagaagaaattttgagtttttgtttttttttaataaataaataaacataaataaattgtttgttgaatttattattagtatgtaagtgtaaatataataaaacttaatatctattcaaattaataaataaacctcgatatacagaccgataaaacacatgcgtcaattttacgcatgattatctttaacgtacgtcacaatatgattatctttctagggttaa

SEQ ID NO: 14561 - DNA, 309 bp, Trichoplusia ni
ccctagaaagatagtctgcgtaaaattgacgcatgcattcttgaaatattgctctctctttctaaatagcgcgaatccgtcgctgtgcatttaggacatctcagtcgccgcttggagctcccgtgaggcgtgcttgtcaatgcggtaagtgtcactgattttgaactataacgaccgcgtgagtcaaaatgacgcatgattatcttttacgtgacttttaagatttaactcatacgataattatattgttatttcatgttctacttacgtgataacttattatatatatattttcttgttatagatatc

SEQ ID NO: 14562 - DNA, 231 bp, Trichoplusia ni
tttgttactttatagaagaaattttgagtttttgtttttttttaataaataaataaacataaataaattgtttgttgaatttattattagtatgtaagtgtaaatataataaaacttaatatctattcaaattaataaataaacctcgatatacagaccgataaaacacatgcgtcaattttacgcatgattatctttaacgtacgtcacaatatgattatctttctaggg

SEQ ID NO: 14563 - DNA, 14 bp, Artificial Sequence
  transposon sequence
ccytttkmctgcca

SEQ ID NO: 14564 - DNA, 16 bp, Artificial Sequence
  transposon sequence
ccctagaagcccaatc

SEQ ID NO: 14565 - DNA, 17 bp, Artificial Sequence
  transposon sequence
ccttccagcgggcgcgc

SEQ ID NO: 14566 - DNA, 13 bp, Artificial Sequence
  transposon sequence
cccagattagcct

SEQ ID NO: 14567 - DNA, 16 bp, Artificial Sequence
  transposon sequence
cccttaattactcgcg

SEQ ID NO: 14568 - DNA, 16 bp, Artificial Sequence
  transposon sequence
ccctagataactaaac

SEQ ID NO: 14569 - DNA, 13 bp, Artificial Sequence
  transposon sequence
ccctagaaagata

SEQ ID NO: 14570 - DNA, 347 bp, Helicoverpa armigera
ttaaccctagaagcccaatctacgtaaatttgacgtataccgcggcgaaatatctctgtctctttcatgtttaccgtcggatcgccgctaacttctgaaccaactcagtagccattgggacctcgcaggacacagttgcgtcatctcggtaagtgccgccattttgttgtactctctattacaacacacgtcacgtcacgtcgttgcacgtcattttgacgtataattgggctttgtgtaacttttgaatttgtttcaaattttttatgtttgtgatttatttgagttaatcgtattgtttcgttacatttttcatataataataatattttcaggttgagtacaaa

SEQ ID NO: 14571 - DNA, 179 bp, Pectinophora gossypiella
tttcactaagtaattttgttcctatttagtagataagtaacacataattattgtgatattcaaaacttaagaggtttaataaataataataaaaaaaaaatggtttttatttcgtagtctgctcgacgaatgtttagttattacgtaaccgtgaatatagtttagtagtctagggttaa

SEQ ID NO: 14572 - protein, 589 aa, Artificial Sequence
  transposase
MAKRFYSAEEAAAHCSASSSEEFSGSDSEYVPPASESDSSTEESWCSSSTVSALEEPMEVDEDVDDLEDQEAGDRADAAAGGEPAWGPPCNFPPEIPPFTTVPGVKVDTSNFEPINFFQLFMTEAILQDMVLYTNVYAEQYLTQNPLTRGARAHAWHPTDIAEMKRFVGLTLAMGLIKANSIESYWDTTTVLSIPVFGATMSRNRYQLLLRFLHFNNNATAVPPDQPGHDRLHKLRPLIDSLSERFANVYTPCQNICIDESLMLFKGRLQFRQYIPSKRARYGIKFYKLCESSTGYTSYFLIYEGKDSKLDPPGCPPDLTVSGKIVWELISPLLGQGFHLYVDNFYSSIPLFTALYCLNTPACGTINRNRKGLPRALLDKKLNRGETYALRKNELLAIKFFDKKNVFMLTSIHDESVIREQRVGRPPKNKPLCSKEYSKYMGGVDRTDQLQHYYNATRKTRHWYKKVGIYLIQMALRNSYIVYKAAVPGPKLSYYKYQLQILPALLFGGVEEQTVPEMPDSDNVARLIGKHFIDTLPPTPGKQRPQKGCKVCRKRGIRRDTRYYCPKCPRNPGLCRKPCFEIYHTQLHY

SEQ ID NO: 14573 - DNA, 78 bp, Xenopus tropicalis
ccctttgcctgccaatcacgcatgggatacgtcgtggcagtaaaagggcttaaatgccaacgacgcgtcccatacgtt

SEQ ID NO: 14574 - DNA, 120 bp, Xenopus tropicalis
cctgggtaaactaaaagtcccctcgaggaaaggcccctaaagtgaaacagtgcaaaacgttcaaaaactgtctggcaatacaagttccactttgggacaaatcggctggcagtgaaaggg

SEQ ID NO: 14575 - DNA, 14 bp, Artificial Sequence
  transposon sequence
ccytttbmctgcca

SEQ ID NO: 14576 - protein, 610 aa, Artificial Sequence
  transposase
MDIERQEERIRAMLEEELSDYSDESSSEDETDHCSEHEVNYDTEEERIDSVDVPSNSRQEEANAIIANESDSDPDDDLPLSLVRQRASASRQMSGPHYTSKDGTKWYKNCQRPNVRLRSENIVTEQAQVKNIARDASTEYECWNIFVTSDMLQEILTHTNSSIRWRQTKTAAENSSASTSFYMQETTLCELKALIGLLYIAGLIKSNRQSLKDLWRTDGTGVDIFRTTMSLQRFQFLQNNIRFDDKSTRDERKQTDNMAAFRSIFDQFVQSCQNAYSPSEFLTIDEMLLSFRGRCLFRVYIPNKPAKYGIKILALVDAKNFYVKNLEVYAGKQPSGPYAVSNRPFEVVERLIQPVARSHRNVTFDNWFTGYELMLHLLNEYRLTSVGTVRKNKRQIPESFIRTDRQPNSSVFGFQKDITLVSYAPKKNKVVVVMSTMHHDNSIDESTGEKQKPEMITFYNSTKAGVDVVDELCANYNVSRNSKRWPMTLFYGVLNMAAINACIIYRTNKNVTIKRTEFIRSLGLSMIYEHLHSRNKKKNIPTYLRQRIEKQLGEPSPRHVNVPGRYVRCQDCPYKKDRKTKRSCNACAKPICMEHAKFLCENCAELDSHL

SEQ ID NO: 14577 - DNA, 221 bp, Bombyx mori
cccggcgagcatgaggcagggtatctcataccctggtaaaattttaaagttgtgtattttataaaattttcgtctgacaacactagcgcgctcagtagctggaggcaggagcgtgcgggaggggatagtggcgtgatcgcagtgtggcacgggacaccggcgagatattcgtgtgcaaacctgtttcgggtatgttataccctgcctcattgttgacgtat

SEQ ID NO: 14578 - DNA, 208 bp, Bombyx mori
tttaagaaaaagattaataaataataataatttcataattaaaaacttctttcattgaatgccattaaataaaccattattttacaaaataagatcaacataattgagtaaataataataagaacaatattatagtacaacaaaatatgggtatgtcataccctgccacattcttgatgtaactttttttcacctcatgctcgccggg

SEQ ID NO: 14579 - DNA, 181 bp, Xenopus tropicalis
ccctttgcctgccaatcacgcatgggatacgtcgtggcagtaaaagggcttaaatgccaacgacgcgtcccatacgttgttggcattttaagtcttctctctgcagcggcagcatgtgccgccgctgcagagagtttctagcgatgacagcccctctgggcaacgagccgggggggctgtc

SEQ ID NO: 14580 - DNA, 181 bp, Xenopus tropicalis
cctttttactgccaatgacgcatgggatacgtcgtggcagtaaaagggcttaaatgccaacgacgcgtcccatacgttgttggcattttaattcttctctctgcagcggcagcatgtgccgccgctgcagagagtttctagcgatgacagcccctctgggcaacgagccgggggggctgtc

SEQ ID NO: 14581 - DNA, 181 bp, Xenopus tropicalis
cctttttactgccaatgacgcatgggatacgtcgtggcagtaaaagggcttaaatgccaacgacgcgtcccatacgttgttggcattttaagtcttctctctgcagcggcagcatgtgccgccgctgcagagagtttctagcgatgacagcccctctgggcaacgagccgggggggctgtc

SEQ ID NO: 14582 - DNA, 134 bp, Xenopus tropicalis
cctttttactgccaatgacgcatgggatacgtcgtggcagtaaaagggcttaaatgccaacgacgcgtcccatacgttgttggcattttaagtcttctctctgcagcggcagcatgtgccgccgctgcagagag

SEQ ID NO: 14583 - DNA, 96 bp, Xenopus tropicalis
cctttttactgccaatgacgcatgggatacgtcgtggcagtaaaagggcttaaatgccaacgacgcgtcccatacgttgttggcattttaagtctt

SEQ ID NO: 14584 - DNA, 96 bp, Xenopus tropicalis
ccctttgcctgccaatcacgcatgggatacgtcgtggcagtaaaagggcttaaatgccaacgacgcgtcccatacgttgttggcattttaagtctt

SEQ ID NO: 14585 - DNA, 185 bp, Xenopus tropicalis
ttatcctttttactgccaatgacgcatgggatacgtcgtggcagtaaaagggcttaaatgccaacgacgcgtcccatacgttgttggcattttaagtcttctctctgcagcggcagcatgtgccgccgctgcagagagtttctagcgatgacagcccctctgggcaacgagccgggggggctgtc

SEQ ID NO: 14586 - DNA, 234 bp, Xenopus tropicalis
tttgcatttttagacatttagaagcctatatcttgttacagaattggaattacacaaaaattctaccatattttgaaagcttaggttgttctgaaaaaaacaatatattgttttcctgggtaaactaaaagtcccctcgaggaaaggcccctaaagtgaaacagtgcaaaacgttcaaaaactgtctggcaatacaagttccactttgggacaaatcggctggcagtgaaaggg

SEQ ID NO: 14587 - DNA, 233 bp, Xenopus tropicalis
tttgcatttttagacatttagaagcctatatcttgttacagaattggaattacacaaaaattctaccatattttgaaagcttaggttgttctgaaaaaaacaatatattgttttcctgggtaaactaaaagtcccctcgaggaaaggcccctaaagtgaaacagtgcaaaacgttcaaaaactgtctggcaatacaagttccactttgaccaaaacggctggcagtaaaaggg

SEQ ID NO: 14588 - DNA, 148 bp, Xenopus tropicalis
ttgttctgaaaaaaacaatatattgttttcctgggtaaactaaaagtcccctcgaggaaaggcccctaaagtgaaacagtgcaaaacgttcaaaaactgtctggcaatacaagttccactttgaccaaaacggctggcagtaaaaggg

SEQ ID NO: 14589 - DNA, 237 bp, Xenopus tropicalis
tttgcatttttagacatttagaagcctatatcttgttacagaattggaattacacaaaaattctaccatattttgaaagcttaggttgttctgaaaaaaacaatatattgttttcctgggtaaactaaaagtcccctcgaggaaaggcccctaaagtgaaacagtgcaaaacgttcaaaaactgtctggcaatacaagttccactttgaccaaaacggctggcagtaaaagggttat

SEQ ID NO: 14590 - DNA, 149 bp, Xenopus tropicalis
ttgttctgaaaaaaacaatatattgttttcctgggtaaactaaaagtcccctcgaggaaaggcccctaaagtgaaacagtgcaaaacgttcaaaaactgtctggcaatacaagttccactttgggacaaatcggctggcagtgaaaggg

SEQ ID NO: 14591 - DNA, 64 bp, Artificial Sequence
  transposon sequence
atcacgcatgggatacgtcgtggcagtaaaagggcttaaatgccaacgacgcgtcccatacgtt

SEQ ID NO: 14592 - DNA, 82 bp, Artificial Sequence
  transposon sequence
atgacgcatgggatacgtcgtggcagtaaaagggcttaaatgccaacgacgcgtcccatacgttgttggcattttaagtctt

SEQ ID NO: 14593 - DNA, 106 bp, Artificial Sequence
  transposon sequence
cctgggtaaactaaaagtcccctcgaggaaaggcccctaaagtgaaacagtgcaaaacgttcaaaaactgtctggcaatacaagttccactttgggacaaatcggc

SEQ ID NO: 14594 - DNA, 134 bp, Artificial Sequence
  transposon sequence
ttgttctgaaaaaaacaatatattgttttcctgggtaaactaaaagtcccctcgaggaaaggcccctaaagtgaaacagtgcaaaacgttcaaaaactgtctggcaatacaagttccactttgaccaaaacggc

SEQ ID NO: 14595 - DNA, 371 bp, Bombyx mori
cccggcgagcatgaggcagggtatctcataccctggtaaaattttaaagttgtgtattttataaaattttcgtctgacaacactagcgcgctcagtagctggaggcaggagcgtgcgggaggggatagtggcgtgatcgcagtgtggcacgggacaccggcgagatattcgtgtgcaaacctgtttcgggtatgttataccctgcctcattgttgacgtattttttttatgtaatttttccgattattaatttcaactgttttattggtatttttatgttatccattgttctttttttatgatttactgtatcggttgtctttcgttcctttagttgagtttttttttattattttcagtttttgatcaaa

SEQ ID NO: 14596 - DNA, 364 bp, Bombyx mori
tcatatttttagtttaaaaaaataattatatgttttataatgaaaagaatctcattatctttcagtattaggttgatttatattccaaagaataatatttttgttaaattgttgatttttgtaaacctctaaatgtttgttgctaaaattactgtgtttaagaaaaagattaataaataataataatttcataattaaaaacttctttcattgaatgccattaaataaaccattattttacaaaataagatcaacataattgagtaaataataataagaacaatattatagtacaacaaaatatgggtatgtcataccctgccacattcttgatgtaactttttttcacctcatgctcgccggg

SEQ ID NO: 14597 - DNA, 301 bp, Bombyx mori
cccggcgagcatgaggcagggtatctcataccctggtaaaattttaaagttgtgtattttataaaattttcgtctgacaacactagcgcgctcagtagctggaggcaggagcgtgcgggaggggatagtggcgtgatcgcagtgtggcacgggacaccggcgagatattcgtgtgcaaacctgtttcgggtatgttataccctgcctcattgttgacgtattttttttatgtaatttttccgattattaatttcaactgttttattggtatttttatgttatccattgttctttttttatg

SEQ ID NO: 14598 - DNA, 285 bp, Bombyx mori
cagggtatctcataccctggtaaaattttaaagttgtgtattttataaaattttcgtctgacaacactagcgcgctcagtagctggaggcaggagcgtgcgggaggggatagtggcgtgatcgcagtgtggcacgggacaccggcgagatattcgtgtgcaaacctgtttcgggtatgttataccctgcctcattgttgacgtattttttttatgtaatttttccgattattaatttcaactgttttattggtatttttatgttatccattgttctttttttatg

SEQ ID NO: 14599 - DNA, 205 bp, Bombyx mori
cagggtatctcataccctggtaaaattttaaagttgtgtattttataaaattttcgtctgacaacactagcgcgctcagtagctggaggcaggagcgtgcgggaggggatagtggcgtgatcgcagtgtggcacgggacaccggcgagatattcgtgtgcaaacctgtttcgggtatgttataccctgcctcattgttgacgtat

SEQ ID NO: 14600 - DNA, 364 bp, Bombyx mori; identical to SEQ ID NO: 14596

SEQ ID NO: 14601 - DNA, 192 bp, Bombyx mori
tttaagaaaaagattaataaataataataatttcataattaaaaacttctttcattgaatgccattaaataaaccattattttacaaaataagatcaacataattgagtaaataataataagaacaatattatagtacaacaaaatatgggtatgtcataccctgccacattcttgatgtaactttttttca

SEQ ID NO: 14602 - DNA, 371 bp, Bombyx mori; identical to SEQ ID NO: 14595

SEQ ID NO: 14603 - DNA, 16 bp, Artificial Sequence
  transposon sequence
cctcatgctcgccggg

SEQ ID NO: 14604 - protein, 589 aa, Artificial Sequence
  transposase
MAKRFYSAEEAAAHCMASSSEEFSGSDSEYVPPASESDSSTEESWCSSSTVSALEEPMEVDEDVDDLEDQEAGDRADAAAGGEPAWGPPCNFPPEIPPFTTVPGVKVDTSNFEPINFFQLFMTEAILQDMVLYTNVYAEQYLTQVPLPRYARAHAWHPTDIAEMKRFVGLTLAMGLIKANSLESYWDTTTVLNIPVFSATMSRNRYQLLLRFLEFNNEATAVPPDQPGHDRLHKLRPLIDSLSERFAAVYTPCQNICIDESLLLFKGRLQFRQYIPSKRARYGIKFYKLCESSSGYTSYFLIYEGKDSKLDPPGCPPDLTVSGKIVWELISPLLGQGFHLYVDNFYSSIPLFTALYCLDTPACGTINRNRKGLPRALLDKKLNRGETYALRKNELLAIKFFDKKNVFMLTSIHDESVIREQRVGRPPKNKPLCSKEYSKYMGGVDRTDQLQHYYNATRKTRAWYKKVGIYLIQMALRNSYIVYKAAVPGPKLSYYKYQLQILPALLFGGVEEQTVPEMPPSDNVARLIGKHFIDTLPPTPGKQRPQKGCKVCRKRGIRRDTRYYCPKCPRNPGLCFKPCFEIYHTQLHY

SEQ ID NO: 14605 - protein, 592 aa, Artificial Sequence
  transposase
MAKRFYSAEEAAAHCMASSSEEFSGSDSEYVPPASESDSSTEESWCSSSTVSALEEPMEVDEDVDDLEDQEAGDRVDAAAGGEPAWGPPCNFPPEIPPFTTVPGVKVDTSNFEPINFFQLFMTEAILQDMVLYTNVYAEQYLTQNPLPRYARAHAWHPTDIAEMKRFVGLTLAMGLIKANSLESYWDTTTVLSIPVFSATMSRNRYQLLLKFLHFNNEATAVPPDQPGHDRLHKLRPLIDSLSERFAAVYTPCQNICIDESLLLFKGRLQFRQYIPSKRARYGIKFYKLCESSSGYTSYFLIYEGKDSKLDPPGCPPDLTVSGKIVWELISPLLGQGFHLYVDNFYSSIPLFTALYCLDTPACGTINRNRKGLPRALLDKKLNRGETYALRKNELLAIKFFDKKNVFMLTSIHDESVIREQRVGRPPKNKPLCSKEYSKYMGGVDRTDQLQHYYNATRKTRAWYKKVGIYLIQMALRNSYIVYKAAVPGPKLSYYKYQLQILPALLFGGVEEQTVPEMPPSDNVARLIGKHFIDTLPPTPGKQRPQKGCKVCRKRGIRRDTRYYCPKCPRNPGLCFKPCFEIYHTQLHYGRR

SEQ ID NO: 14606 - protein, 610 aa, Artificial Sequence
  transposase
MDIERQEERIRAMLEEELSDYSDESSSEDETDHCSEHEVNYDTEEERIDSVDVPSNSRQEEANAIIANESDSDPDDDLPLSLVRQRASASRQVSGPFYTSKDGTKWYKNCQRPNVRLRSENIVTEQAQVKNIARDASTEYECWNIFVTSDMLQEILTHTNSSIRHRQTKTAAENSSAETSFYMQETTLCELKALIALLYLAGLIKSNRQSLKDLWRKDGTGVDIFRTTMSLQRFQFLLNNIRFDDISTRDERKQTDNMAAFRSIFDQFVQCCQNAYSPSEFLTIDEMLLSFRGRCLFRVYIPNKPAKYGIKILALVDAKNFYVVNLEVYAGKQPSGPYAVSNRPFEVVERLIQPVARSHRNVTFDNWFTGYELMLHLLNEYRLTSVGTVRKNKRQIPESFIRTDRQPNSSVFGFQKDITLVSYAPKKNKVVVVMSTMHHDNSIDESTGEKQKPEMITFYNSTKAGVDVVDELCANYNVSRNSKKWPMTLFYGVLNMAAINACIIYRTNKNVTIKRTEFIRSLGLSMMYEHLHSRNKKKNIPTYLRQRIEKQLGEPVPRHVNVPGRYVRCQDCPYKKDRKTKRSCNACAKPICMEHAKFLCENCAELDSSL

SEQ ID NO: 14607 - protein, 610 aa, Artificial Sequence
  transposase
MDIERQEERIRAMLEEELSDYSDESSSEDETDHCSEHEVNYDTEEERIDSVDVPSNSRQEEANAIIANESDSDPDDDLPLSLVRQRASASRQVSGPFYTSKDGTKWYKNCQRPNVRLRSENIVTEQAQVKNIARDASTEYECWNIFVTSDMLQEILTHTNSSIRHRQTKTAAENSSAETSFYMQETTLCELKALIGLLYLAGLIKSNRQSLKDLWRTDGTGVDIFRTTMSLQRFYFLQNNIRFDDKSTLDERKQTDNMAAFRSIFDQFVQSCQNAYSPSEFLTIDEMLLSFRGRCLFRVYIPNKPAKYGIKILALVDAKNFYVVNLEVYAGKQPSGPYAVSNRPFEVVERLIQPVARSHRNVTFDNWFTGYELMLHLLNEYRLTSVGTVRKNKRQIPESFIRTDRQPNSSVFGFQKDITLVSYAPKKNKVVVVMSTMHHDNSIDESTGEKQKPEMITFYNSTKAGVDVVDELCANYNVSRNSKRWPMTLFYGVLNMAAINACIIYRTNKNVTIKRTEFIRSLGLSMIYEHLHSRNKKKNIPTYLRQRIEKQLGEPSPRHVNYPGRYVRCQDCPYKKDRKTKRSCNACAKPICMEHAKFLCVNCAELDSSL

SEQ ID NO: 14608 - protein, 610 aa, Artificial Sequence
  transposase
MDIERQEERIRAMLEEELSDYSDESSSEDETDHCSEHEVNYDTEEERIDSVDVPSNSRQEEANAIIANESDSDPDDDLPLSLVRQRASASRQVSGPFYTSKDGTKWYKNCQRPNVRLRSENIVTEQAQVKNIARDASTEYECWNIFVTSDMLQEILTHTNSSIRHRQTKTAAENSSAETSFYMQETTLCELKALIALLYLAGLIKSNRQSLKDLWRKDGTGVDIFRTTMSLQRFQFLLNNIRFDDKSTRDERKQTDNMAAFRSIFDQFVQCCQNAYSPSEFLTIDEMLLSFRGRCLFRVYIPNKPAKYGIKILALVDAKNDYVVNLEVYAGKQPSGPYAVSNRPFEVVERLIQPVARSHRNVTFDNWFTGYECMLHLLNEYRLTSVGTVRKNKRQIPESFIRTDRQPNSSVFGFQKDITLVSYAPKKNKVVVVMSTMHHDNSIDESTGEKQKPEMITFYNSTKAGVDVVDELCANYNVSRNSKKWPMTLFYGVLNMAAINACIIYRTNKNVTIKRTEFIRSLGLSMIKEHLHSRNKKKNIPTYLRQRIEKQLGEPSPRHVNVPGRYVRCQDCPYKKDRKTKRSCNACAKPICMEHAKFLCENCAELDSSL

SEQ ID NO: 14609 - DNA, 249 bp, Trichoplusia ni
tctaaatagcgcgaatccgtcgctgtgcatttaggacatctcagtcgccgcttggagctcccgtgaggcgtgcttgtcaatgcggtaagtgtcactgattttgaactataacgaccgcgtgagtcaaaatgacgcatgattatcttttacgtgacttttaagatttaactcatacgataattatattgttatttcatgttctacttacgtgataacttattatatatatattttcttgttatagatatc

SEQ ID NO: 14610 - DNA, 231 bp, Trichoplusia ni; identical to SEQ ID NO: 14562

SEQ ID NO: 14611 - protein, 592 aa, Artificial Sequence
  transposase
MAKRFYSAEEAAAHCMASSSEEFSGSDSEYVPPASESDSSTEESWCSSSTVSALEEPMEVDEDVDDLEDQEAGDRADAAAGGEPAWGPPCNFPPEIPPFTTVPGVKVDTSNFEPINFFQLFMTEAILQDMVLYTNVYAEQYLTQNVLPRYARAHAWHPTDIAEMKRFVGLTLAMGLIKANSLESYWDTTTVLSIPVFSATMSRNRYQLLLRFLHFNNDATAVPPDQPGHDRLHKLRPLIDSLTERFAAVYTPCQNICIDESLLLFKGRLQFRQYIPSKRARYGIKFYKLCESSSGYTSYFLIYEGKDSKLDPPGCPPDLTVSGKIVWELISPLLGQGFHLYVDNFYSSIPLFTALYCLDTPACGTINRNRKGLPRALLDKKLNRGETYALRKNELLAIKFFDKKNVFMLTSIHDESVIREQRVGRPPKNKPLCSKEYSKYMGGVDRTDQLQHYYNATRKTRAWYKKVGIYLIQMALRNSYIVYKAAVPGPKLSYYKYQLQILPALLFGGVEEQTVPEMPPSDNVARLIGKHFIDTLPPTPGKQRPQKGCKVCRKRGIRRDTRYYCPKCPRNPGLCFKPCFEIYHTQLHYGRR

SEQ ID NO: 14612 - protein, 592 aa, Artificial Sequence
  transposase
MAKRFYSAEEAAAHCMASSSEEFSGSDSEYVPPASESDSSTEESWCSSSTVSALEEPMEVDEDVDDLEDQEAGDRADAAPGGEPAWGPPCNFPPEIPPFTTVPGVKVDTSNFEPINFFQLFMTEAILQDMVLYTNVYAEQYLTQVPLPRYARAHAWHPTDIAEMKRFVGLTLAMGLIKANSLESYWDTTTVLSIPVFSATMSRNRYQLLLRFLHFNNEATAVPPDQPGHDRLHKLRPLIDSLSERFAAVYTPCQNICIDESLLLFKGRLQFRQYIPSKRARYGIKFYKLCESSSGYTSYFLIYEGKDSKLDPPGCPPDLTVSGKIVWELISPLLGQGFHLYVDNFYSSIPLFTALYCLDTPACGTINRNRKGLPRALLDKKLNRGETYALRKNELLAIKFFDKKNVFMLTSIHDESVIREQRVGRPPKNKPLCSKEYSKYMGGVDRTDQLQHYYNATRKTRAWYKKVGIYLIQMALRNSYIVYKAAVPGPKLSYYKYQLQILPALLFGGVEEQTVPEMPPSDNVARLIGKHFIDTLPPTPGKQRPQKGCKVCRKRGIRRDTRYYCPKCPRNPGLCFKPCFEIYHTQLHYGRR

SEQ ID NO: 14613 - protein, 592 aa, Artificial Sequence
  transposase
MAKRFYSAEEAAAHCMASSSEEFSGSDSEYVPPASESDSSTEESWCSSSTVSALEEPMEVDEDVDDLEDQEAGDRADAAAGGEPAWGPPCNFPPEIPPFTTVPGVKVDTSNFEPINFFQLFMTEAILQDMVLYTNVYAEQYLTQVPLPRYARAHAWHPTDIAEMKRFVGLTLAMGLIKANSLESYWDTTTVLNIPVFSATMSRNRYQLLLRFLEFNNNATAVPPDQPGHDRLHKLRPLIDSLSERFAAVYTPCQNICIDESLLLFKGRLQFRQYIPSKRARYGIKFYKLCESSSGYTSYFLIYEGKDSKLDPPGCPPDLTVSGKIVWELISPLLGQGFHLYVDNFYSSIPLFTALYCLDTPACGTINRNRKGLPRALLDKKLNRGETYALRKNELLAIKFFDKKNVFMLTSIHDESVIREQRVGRPPKNKPLCSKEYSKYMGGVDRTDQLQHYYNATRKTRAWYKKVGIYLIQMALRNSYIVYKAAVPGPKLSYYKYQLQILPALLFGGVEEQTVPEMPPSDNVARLIGKHFIDTLPPTPGKQRPQKGCKVCRKRGIRRDTRYYCPKCPRNPGLCFKPCFEIYHTQLHYGRR

SEQ ID NO: 14614 - DNA, 14 bp, Artificial Sequence
  transposon
atgaggcagggtat

SEQ ID NO: 14615 - DNA, 14 bp, Artificial Sequence
  transposon sequence
ataccctgcctcat

SEQ ID NO: 14616 - DNA, 10 bp, Artificial Sequence
  transposon sequence
ggcagggtat

SEQ ID NO: 14617 - DNA, 10 bp, Artificial Sequence
  transposon sequence
ataccctgcc

SEQ ID NO: 14618 - DNA, 10 bp, Artificial Sequence
  transposon sequence
taaaatttta

SEQ ID NO: 14619 - DNA, 12 bp, Artificial Sequence
  transposon sequence
attttataaaat

SEQ ID NO: 14620 - DNA, 10 bp, Artificial Sequence
  transposon sequence
tcataccctg

SEQ ID NO: 14621 - DNA, 13 bp, Artificial Sequence
  transposon sequence
taaataataataa

SEQ ID NO: 14622 - DNA, 14 bp, Artificial Sequence
  transposon sequence
ccctttgcctgcca

SEQ ID NO: 14623 - DNA, 14 bp, Artificial Sequence
  transposon sequence
tggcagtgaaaggg

SEQ ID NO: 14624 - protein, 589 aa, Artificial Sequence
  transposase
MAKRFYSAEEAAAHCMASSSEEFSGSDSEYVPPASESDSSTEESWCSSSTVSALEEPMEVDEDVDDLEDQEAGDRADAAAGGEPAWGPPCNFPPEIPPFTTVPGVKVDTSNFEPINFFQLFMTEAILQDMVLYTNVYAEQYLTQNPLTRYARAHAWHPTDIAEMKRFVGLTLAMGLIKANSLESYWDTTTVLSIPVFSATMSRNRYQLLLRFLHFNNNATAVPPDQPGHDRLHKLRPLIDSLSERFAAVYTPCQNICIDESLLLFKGRLQFRQYIPSKRARYGIKFYKLCESSSGYTSYFLIYEGKDSKLDPPGCPPDLTVSGKIVWELISPLLGQGFHLYVDNFYSSIPLFTALYCLNTPACGTINRNRKGLPRALLDKKLNRGETYALRKNELLAIKFFDKKNVFMLTSIHDESVIREQRVGRPPKNKPLCSKEYSKYMGGVDRTDQLQHYYNATRKTRHWYKKVGIYLIQMALRNSYIVYKAAVPGPKLSYYKYQLQILPALLFGGVEEQTVPEMPPSDNVARLIGKHFIDTLPPTPGKQRPQKGCKVCRKRGIRRDTRYYCPKCPRNPGLCRKPCFEIYHTQLHY

SEQ ID NO: 14625 - protein, 589 aa, Artificial Sequence
  transposase
MAKRFYSAEEAAAHCMASSSEEFSGSDSEYVPPASESDSSTEESWCSSSTVSALEEPMEVDEDVDDLEDQEAGDRADAAAGGEPAWGPPCNFPPEIPPFTTVPGVKVDTSNFEPINFFQLFMTEAILQDMVLYTNVYAEQYLTQNPLPRYARAHAWHPTDIAEMKRFVGLTLAMGLIKANSLESYWDTTTVLKIPVFSATMSRNRYQLLLRFLHFNNNATAVPPDQPGHDRLHKLRPLIDSLSERFAAVYTPCQNICIDESLLLFKGRLQFRQYIPSKRARYGIKFYKLCESSSGYTSYFLIYEGKDSKLDPPGCPPDLTVSGKIVWELISPLLGQGFHLYVDNFYSSIPLFTALYCLNTPACGTINRNRKGLPRALLDKKLNRGETYALRKNELLAIKFFDKKNVFMLTSIHDESVIREQRVGRPPKNKPLCSKEYSKYMGGVDRTDQLQHYYNATRKTRHWYKKVGIYLIQMALRNSYIVYKAAVPGPKLSYYKYQLQILPALLFGGVEEQTVPEMPPSDNVARLIGKHFIDTLPPTPGKQRPQKGCKVCRKRGIRRDTRYYCPKCPRNPGLCFKPCFEIYHTQLHY

SEQ ID NO: 14626 - DNA, 1794 bp, Artificial Sequence
  transposase
atggcacccaaaaagaaacgtaaagtgatggccaaaagattttacagcgccgaagaagcagcagcacattgcatggcatcgtcatccgaagaattctcggggagcgattccgaatatgtcccaccggcctcggaaagcgattcgagcactgaggagtcgtggtgttcctcctcaactgtctcggctcttgaggagccgatggaagtggatgaggatgtggacgacttggaggaccaggaagccggagacagggccgacgctgccgcgggaggggagccggcgtggggacctccatgcaattttcctcccgaaatcccaccgttcactactgtgccgggagtgaaggtcgacacgtccaacttcgaaccgatcaatttctttcaactcttcatgactgaagcgatcctgcaagatatggtgctctacactaatgtgtacgccgagcagtacctgactcaaaacccgctgcctcgctacgcgagagcgcatgcgtggcacccgaccgatatcgcggagatgaagcggttcgtgggactgaccctcgcaatgggcctgatcaaggccaacagcctcgagtcatactgggataccacgactgtgcttagcattccggtgttctccgctaccatgtcccgtaaccgctaccaactcctgctgcggttcctccacttcaacaacaatgcgaccgctgtgccacctgaccagccaggacacgacagactccacaagctgcggccattgatcgactcgctgagcgagcgattcgccgcggtgtacaccccttgccaaaacatttgcatcgacgagtcgcttctgctgtttaaaggccggcttcagttccgccagtacatcccatcgaagcgcgctcgctatggtatcaaattctacaaactctgcgagtcgtccagcggctacacgtcatacttcttgatctacgaggggaaggactctaagctggacccaccggggtgtccaccggatcttactgtctccggaaaaatcgtgtgggaactcatctcacctctcctcggacaaggctttcatctctacgtcgacaatttctactcatcgatccctctgttcaccgccctctactgcctggatactccagcctgtgggaccattaacagaaaccggaagggtctgccgagagcactgctggataagaagttgaacaggggagagacttacgcgctgagaaagaacgaactcctcgccatcaaattcttcgacaagaaaaatgtgtttatgctcacctccatccacgacgaatccgtcatccgggagcagcgcgtgggcaggccgccgaaaaacaagccgctgtgctctaaggaatactccaagtacatggggggtgtcgaccggaccgatcagctgcagcattactacaacgccactagaaagacccgggcctggtacaagaaagtcggcatctacctgatccaaatggcactgaggaattcgtatattgtctacaaggctgccgttccgggcccgaaactgtcatactacaagtaccagcttcaaatcctgccggcgctgctgttcggtggagtggaagaacagactgtgcccgagatgccgccatccgacaacgtggcccggttgatcggaaagcacttcattgataccctgcctccgacgcctggaaagcagcggccacagaagggatgcaaagtttgccgcaagcgcggaatacggcgcgatacccgctactattgcccgaagtgcccccgcaatcccggactgtgtttcaagccctgttttgaaatctaccacacccagttgcattac

SEQ ID NO: 14627 - protein, 589 aa, Artificial Sequence
  transposase
MAKRFYSAEEAAAHCMASSSEQTSGSDSEYVPPASESDSSTEESWCSSSTVSALEEPMEVDEDVDDLEDQEAGDRADAAAGGEPAWGPPCNFPPEIPPFTTVPGVKVDTSNFEPINFFQLFMTEAILQDMVLYTNVYAEQYLTQNPLTRYARAHAWHPTDIAEMKRFVGLTLAMGLIKANSIESYWDTTTVLSIPVFGATMSRNRYQLLLRFLHFNNNATAVPPDQPGHDRLHKLRPLIDSLSERFANVYTPCQNICIDESLLLFKGRLQFRQYIPSKRARYGIKFYKLCESSSGYTSYFLIYEGKDSKLDPPGCPPDLTVSGKIVWELISPLLGQGFHLYVDNFYSSIPLFTALYCLNTPACGTINRNRKGLPRALLDKKLNRGETYALRKNELLAIKFFDKKNVFMLTSIHDESVIREQRVGRKPKNKPLCSKEYSKYMGGVDRTDQLQHYYNATRKTRHWYKKVGIYLIQMALRNSYIVYKAAVPGPKLSYYKYQLQILPALLFGGVEEQTVPEMPPSDNVARLIGKHFIDTLPPTPGKQRPQKGCKVCRKRGIRRDTRYYCPKCPRNPGLCRKPCFEIYHTQLHY

SEQ ID NO: 14628 - protein, 589 aa, Artificial Sequence
  transposase
MAKRFYSAEEAAAHCSASSSEEFSGSDSEYVPPASESDSSTEESWCSSSTVSALEEPMEVDEDVDDLEDQEAGDRADAAAGGEPAWGPPCNFPPEIPPFTTVPGVKVDTSNFEPINFFQLFMTEAILQDMVLYTNVYAEQYLTQNPLTRGARAHAWHPTDIAEMKRFVGLTLAMGLIKANSLESYWDTTTVLSIPVFGATMSRNRYQLLLRFLHFNNNATAVPPDQPGHDRLHKLRPLIDSLSERFANVYTPCQNICIDESLMLFKGRLQFRQYIPSKRARYGIKFYKLCESSTGYTSYFLIYEGKDSKLDPPGCPPDLTVSGKIVWELISPLLGQGFHLYVDNFYSSIPLFTALYCLNTPACGTINRNRKGLPRALLDKKLNRGETYALRKNELLAIKFFDKKNVFMLTSIHDESVIREQRVGRPPKNKPLCSKEYSKYMGGVDRTDQLQHYYNATRKTRHWYKKVGIYLIQMALRNSYIVYKAAVPGPKLSYYKYQLQILPALLFGGVEEQTVPEMPPSDNVARLIGKHFIDTLPPTPGKQRPQKGCKVCRKRGIRRDTRYYCPKCPRNPGLCRKPCFEIYHTQLHY

SEQ ID NO: 14629 - DNA, 1857 bp, Artificial Sequence
  transposase
atggcacccaaaaagaaacgtaaagtgatggacattgaaagacaggaagaaagaatcagggcgatgctcgaagaagaactgagcgactactccgacgaatcgtcatcagaggatgaaaccgaccactgtagcgagcatgaggttaactacgacaccgaggaggagagaatcgactctgtggatgtgccctccaactcacgccaagaagaggccaatgcaattatcgcaaacgaatcggacagcgatccagacgatgatctgccactgtccctcgtgcgccagcgggccagcgcttcgagacaagtgtcaggtccattctacacttcgaaggacggcactaagtggtacaagaattgccagcgacctaacgtcagactccgctccgagaatatcgtgaccgaacaggctcaggtcaagaatatcgcccgcgacgcctcgactgagtacgagtgttggaatatcttcgtgacttcggacatgctgcaagaaattctgacgcacaccaacagctcgattaggcatcgccagaccaagactgcagcggagaactcatcggccgaaacctccttctatatgcaagagactactctgtgcgaactgaaggcgctgattgcactgctgtacttggccggcctcatcaaatcaaataggcagagcctcaaagatctctggagaacggatggaactggagtggatatctttcggacgactatgagcttgcagcggttccagtttctgcaaaacaatatcagattcgacgacaagtccacccgggacgaaaggaaacagactgacaacatggctgcgttccggtcaatattcgatcagtttgtgcagtgctgccaaaacgcttatagcccatcggaattcctgaccatcgacgaaatgcttctctccttccgggggcgctgcctgttccgagtgtacatcccgaacaagccggctaaatacggaatcaaaatcctggccctggtggacgccaagaatttctacgtcgtgaatctcgaagtgtacgcaggaaagcaaccgtcgggaccgtacgctgtttcgaaccgcccgtttgaagtcgtcgagcggcttattcagccggtggccagatcccaccgcaatgttaccttcgacaattggttcaccggctacgagctgatgcttcaccttctgaacgagtaccggctcactagcgtggggactgtcaggaagaacaagcggcagatcccagaatccttcatccgcaccgaccgccagcctaactcgtccgtgttcggatttcaaaaggatatcacgcttgtctcgtacgcccccaagaaaaacaaggtcgtggtcgtgatgagcaccatgcatcacgacaacagcatcgacgagtcaaccggagaaaagcaaaagcccgagatgatcaccttctacaattcaactaaggccggcgtcgacgtcgtggatgaactgtgcgcgaactataacgtgtcccggaactctaagcggtggcctatgactctcttctacggagtgctgaatatggccgcaatcaacgcgtgcatcatctaccgcaccaacaagaacgtgaccatcaagcgcaccgagttcatcagatcgctgggtttgagcatgatctacgagcacctccattcacggaacaagaagaagaatatccctacttacctgaggcagcgtatcgagaagcagttgggagaaccaagcccgcgccacgtgaacgtgccggggcgctacgtgcggtgccaagattgcccgtacaaaaaggaccgcaaaaccaaaagatcgtgtaacgcgtgcgccaaacctatctgcatggagcatgccaaatttctgtgtgaaaattgtgctgaactcgattcctccctg

SEQ ID NO: 14630 - protein, 608 aa, Artificial Sequence
  transposase
MDIERQEERIRAMLEEELSDYSDESSSEDETDHCSEHEVNYDTEEERIDSVDVPSNSRQEEANAIIANESDSDPDDDLPLSLVRQRASASRQVSGPFYTSKDGTKWYKNCQRPNVRLRSENIVTEQAQVKNIARDASTEYECWNIFVTSDMLQEILTHTNSSIRWRQTKTAAENSSAETSFYMQETTLCELKALIGLLYIAGLIKSNRQSLKDLWRTDGTGVDIFRTTMSLQRFQFLLNNIRFDDKSTRDERKQTDNMAAFRSIFDQFVQSCQNAYSPSEFLTIDEMLLSFRGRCLFRVYIPNKPAKYGIKILALVDAKNFYVHNLEVYAGKQPSGPYAVSNRPFEVVERLIQPVARSHRNVTFDNWFTGYEVMLHLLNEYRLTSVGTVRKNKRQIPESFIRTDRQPNSSVFGFQKDITLVSYAPKKNKVVVVMSTMHHDNSIDESTGEKQKPEMITFYNSTKAGVDVVDELCANYNVSRNSKRWPMTLFYGVLNMAAINACIIYRTNKNVTIKRTEFIRSLGLSMIYEHLHSRNKKKNIPTYLRQRIEKQLGEPSPRHVNVPGRYVRCQDCPYKKDRKTKRSCNACAKPICMEHAKFLCENCAHLDS

SEQ ID NO: 14631 - protein, 610 aa, Artificial Sequence
  transposase
MDIERQEERIRAMLEEELSDYSDESSSEDETDHCSEHEVNYDTEEERIDSVDVPSNSRQEEANAIIANESDSDPDDDLPLSLVRQRASASRQVSGPFYTSKDGTKWYKNCQRPNVRLRSENIVTEQAQVKNIARDASTEYECWNIFVTSDMLQEILTHTNSSIRWRQTKTAAENSSASTSFYMQETTLCELKALIGLLYIAGLIKSNRQSLKDLWRTDGTGVDIFRTTMSLQRFQFLLNNIRFDDKSTRDERKQTDNMAAFRSIFDQFVQSCQNAYSPSEFLTIDEMLLSFRGRCLFRVYIPNKPAKYGIKILALVDAKNFYVKNLEVYAGKQPSGPYAVSNRPFEVVERLIQPVARSHRNVTFDNWFTGYELMLHLLNEYRLTSVGTVRKNKRQIPESFIRTDRQPNSSVFGFQKDITLVSYAPKKNKVVVVMSTMHHDNSIDESTGEKQKPEMITFYNSTKAGVDVVDELCANYNVSRNSKRWPMTLFYGVLNMAAINACIIYRTNKNVTIKRTEFIRSLGLSMIYEHLHSRNKKKNIPTYLRQRIAMQLGEPSPRHVNVPGRYVRCQDCPYKKDRKTKRSCNACAKPICMEHAKFLCENCAELDSSL

SEQ ID NO: 14632 - protein, 610 aa, Artificial Sequence
  transposase
MDIERQEERIRAMLEEELSDYSDESSSEDETDHCSEHEVNYDTEEERIDSVDVPSNSRQEEANAIIANESDSDPDDDLPLSLVRQRASASRQVSGPFYTSKDGTKWYKNCQRPNVRLRSENIVTEQAQVKNIARDASTEYECWNIFVTSDMLQEILTHTNSSIRWRQTKTAAENSSAETSFYMQETTLCELKALIGLLYIAGLIKSNRQSLKDLWRTDGTGVDIFRTTMSLQRFQFLLNNIRFDDKSTRDERKQTDNMAAFRSIFDQFVQSCQNAYSPSEFLTIDEMLLSFRGRCLFRVYIPNKPAKYGIKILALVDAKNFYVKNLEVYAGKQPSGPYAVSNRPFEVVERLIQPVARSHRNVTFDNWFTGYELMLHLLNEYRLTSVGTVRKNKTQIPENFIRTDRQPNSSVFGFQKDITLVSYAPKKNKVVVVMSTMHHDNSIDESTGEKQKPEMITFYNSTKAGVDVVDELQANYNVSRNSKRWPMTLFYGVLNMAAINACIIYRTNKNVTIKRTEFIRSLGLSMIYEHLHSRNKKKNIPTYLRQRIEKQLGEPSPRHVNVPGRYVRCQDCPYKKDRKTKRSCNACAKPICMEHAKFLCENCAELDSSL

SEQ ID NO: 14633 - protein, 610 aa, Artificial Sequence
  transposase
MDIERQEERIRAMLEEELSDYSDESSSEDETDHCSEHEVNYDTEEERIDSVDVPSNSRQEEANAIIANESDSDPDDDLPLSLVRQRASASRQVSGPFYTSKDGTKWYKNCQRPNVRLRSENIVTEQAQVKNIARDASTEYECWNIFVTSDMLQEILTHTNSSIRWRQTKTAAENSSAETSFYMQETTLCELKALIGLLYIAGLIKSNRQSLKDLWRTDGTGVDIFRTTMSLQRFQFLQNNIRFDDKSTRDERKQTDNMAAFRSIFDQFVQSCQNAYSPSEFLTIDEMLLSFRGRCLFRVYIPNKPAKYGIKILALVDAKNFYVKNLEVYAGKQPSGPYAVSNRPFEVVERLIQPVARSHRNVTFDNWFTGYELMLHLLNEYRLTSVGTVRKNKRQIPESFIRTDRQPNSSVFGFQKDITLVSYAPKKNKVVVVMSTMHHDNSIDESTGEKQKPEMITFYNSTKAGVDVVDELCANYNVSRNSKRWPMTLFYGVLNMAAINACIIYRTNKNVTIKRTEFIRSLGLSMIYEHLHSRNKKKNIPTYLRQRIEKQLGEPSPRHVNVPGRYVRCQDCPYKKDRKTKRSCNACAKPICMEHAKFLCENCAELDSSL

SEQ ID NO: 14634 - protein, 610 aa, Artificial Sequence
  transposase
MDIERQEERIRAMLEEELSDYSDESSSEDETDHCSEHEVNYDTEEERIDSVDVPSNSRQEEANAIIANESDSDPDDDLPLSLVRQRASASRQVSGPFYTSKDGTKWYKNCQRPNVRLRSENIVTEQAQVKNIARDASTEYECWNIFVTSDMLQEILTHTNSSIRHRQTKTAAENSSAETSFYMQETTLCELKALIALLYLAGLIKSNRQSLKDLWRTDGTGVDIFRTTMSLQRFQFLQNNIRFDDKSTRDERKQTDNMAAFRSIFDQFVQCCQNAYSPSEFLTIDEMLLSFRGRCLFRVYIPNKPAKYGIKILALVDAKNDYVVNLEVYAGKQPSGPYAVSNRPFEVVERLIQPVARSHRNVTFDNWFTGYELMLHLLNEYRLTSVGTVRKNKRQIPESFIRTDRQPNSSVFGFQKDITLVSYAPKKNKVVVVMSTMHHDNSIDESTGEKQKPEMITFYNSTKAGVDVVDELCANYNVSRNSKRWPMTLFYGVLNMAAINACIIYRTNKNVTIKRTEFIRSLGLSMIYEHLHSRNKKKNIPTYLRQRIEKQLGEPSSRHVNVKGRYVRCQDCPYKKDRKTKRSCNACAKPICMEHAKFLCENCAELDSSL

SEQ ID NO: 14635 - protein, 107 aa, Homo sapiens
GVQVETISPGDGRTFPKRGQTCVVHYTGMLEDGKKVDSSRDRNKPFKFMLGKQEVIRGWEEGVAQMSVGQRAKLTISPDYAYGATGHPGIIPPHATLVFDVELLKLE

SEQ ID NO: 14636 - DNA, 321 bp, Artificial Sequence
  nucleic acid sequence encoding FKBP12
ggggtccaggtcgagactatttcaccaggggatgggcgaacatttccaaaaaggggccagacttgcgtcgtgcattacaccgggatgctggaggacgggaagaaagtggacagctccagggatcgcaacaagcccttcaagttcatgctgggaaagcaggaagtgatccgaggatgggaggaaggcgtggcacagatgtcagtcggccagcgggccaaactgaccattagccctgactacgcttatggagcaacaggccacccagggatcattccccctcatgccaccctggtcttcgatgtggaactgctgaagctggag

SEQ ID NO: 14637 - protein, 5 aa, Artificial Sequence
  linker
GGGGS

SEQ ID NO: 14638 - DNA, 15 bp, Artificial Sequence
  linker
ggaggaggaggatcc

SEQ ID NO: 14639 - protein, 282 aa, Artificial Sequence
  truncated caspase 9
GFGDVGALESLRGNADLAYILSMEPCGHCLIINNVNFCRESGLRTRTGSNIDCEKLRRRFSSLHFMVEVKGDLTAKKMVLALLELAQQDHGALDCCVVVILSHGCQASHLQFPGAVYGTDGCPVSVEKIVNIFNGTSCPSLGGKPKLFFIQACGGEQKDHGFEVASTSPEDESPGSNPEPDATPFQEGLRTFDQLDAISSLPTPSDIFVSYSTFPGFVSWRDPKSGSWYVETLDDIFEQWAHSEDLQSLLLRVANAVSVKGIYKQMPGCFNFLRKKLFFKTS

SEQ ID NO: 14640 - DNA, 843 bp, Artificial Sequence
  truncated caspase 9
tttggggacgtgggggccctggagtctctgcgaggaaatgccgatctggcttacatcctgagcatggaaccctgcggccactgtctgatcattaacaatgtgaacttctgcagagaaagcggactgcgaacacggactggctccaatattgactgtgagaagctgcggagaaggttctctagtctgcactttatggtcgaagtgaaaggggatctgaccgccaagaaaatggtgctggccctgctggagctggctcagcaggaccatggagctctggattgctgcgtggtcgtgatcctgtcccacgggtgccaggcttctcatctgcagttccccggagcagtgtacggaacagacggctgtcctgtcagcgtggagaagatcgtcaacatcttcaacggcacttcttgccctagtctggggggaaagccaaaactgttctttatccaggcctgtggcggggaacagaaagatcacggcttcgaggtggccagcaccagccctgaggacgaatcaccagggagcaaccctgaaccagatgcaactccattccaggagggactgaggacctttgaccagctggatgctatctcaagcctgcccactcctagtgacattttcgtgtcttacagtaccttcccaggctttgtctcatggcgcgatcccaagtcagggagctggtacgtggagacactggacgacatctttgaacagtgggcccattcagaggacctgcagagcctgctgctgcgagtggcaaacgctgtctctgtgaagggcatctacaaacagatgcccgggtgcttcaattttctgagaaagaaactgttctttaagacttcc

SEQ ID NO: 14641 - protein, 394 aa, Artificial Sequence
  truncated caspase 9
GVQVETISPGDGRTFPKRGQTCVVHYTGMLEDGKKVDSSRDRNKPFKFMLGKQEVIRGWEEGVAQMSVGQRAKLTISPDYAYGATGHPGIIPPHATLVFDVELLKLEGGGGSGFGDVGALESLRGNADLAYILSMEPCGHCLIINNVNFCRESGLRTRTGSNIDCEKLRRRFSSLHFMVEVKGDLTAKKMVLALLELAQQDHGALDCCVVVILSHGCQASHLQFPGAVYGTDGCPVSVEKIVNIFNGTSCPSLGGKPKLFFIQACGGEQKDHGFEVASTSPEDESPGSNPEPDATPFQEGLRTFDQLDAISSLPTPSDIFVSYSTFPGFVSWRDPKSGSWYVETLDDIFEQWAHSEDLQSLLLRVANAVSVKGIYKQMPGCFNFLRKKLFFKTS

SEQ ID NO: 14642 - DNA, 1182 bp, Artificial Sequence
  truncated caspase 9
ggggtccaggtcgagactatttcaccaggggatgggcgaacatttccaaaaaggggccagacttgcgtcgtgcattacaccgggatgctggaggacgggaagaaagtggacagctccagggatcgcaacaagcccttcaagttcatgctgggaaagcaggaagtgatccgaggatgggaggaaggcgtggcacagatgtcagtcggccagcgggccaaactgaccattagccctgactacgcttatggagcaacaggccacccagggatcattccccctcatgccaccctggtcttcgatgtggaactgctgaagctggagggaggaggaggatccggatttggggacgtgggggccctggagtctctgcgaggaaatgccgatctggcttacatcctgagcatggaaccctgcggccactgtctgatcattaacaatgtgaacttctgcagagaaagcggactgcgaacacggactggctccaatattgactgtgagaagctgcggagaaggttctctagtctgcactttatggtcgaagtgaaaggggatctgaccgccaagaaaatggtgctggccctgctggagctggctcagcaggaccatggagctctggattgctgcgtggtcgtgatcctgtcccacgggtgccaggcttctcatctgcagttccccggagcagtgtacggaacagacggctgtcctgtcagcgtggagaagatcgtcaacatcttcaacggcacttcttgccctagtctggggggaaagccaaaactgttctttatccaggcctgtggcggggaacagaaagatcacggcttcgaggtggccagcaccagccctgaggacgaatcaccagggagcaaccctgaaccagatgcaactccattccaggagggactgaggacctttgaccagctggatgctatctcaagcctgcccactcctagtgacattttcgtgtcttacagtaccttcccaggctttgtctcatggcgcgatcccaagtcagggagctggtacgtggagacactggacgacatctttgaacagtgggcccattcagaggacctgcagagcctgctgctgcgagtggcaaacgctgtctctgtgaagggcatctacaaacagatgcccgggtgcttcaattttctgagaaagaaactgttctttaagacttcc

SEQ ID NO: 14643 - protein, 18 aa, Artificial Sequence
  T2A peptide
EGRGSLLTCGDVEENPGP

SEQ ID NO: 14644 - protein, 21 aa, Artificial Sequence
  GSG-T2A peptide
GSGEGRGSLLTCGDVEENPGP

SEQ ID NO: 14645 - DNA, 63 bp, Artificial Sequence
  GSG-T2A
ggatctggagagggaaggggaagcctgctgacctgtggagacgtggaggaaaacccaggacca

SEQ ID NO: 14646 - protein, 20 aa, Artificial Sequence
  E2A peptide
QCTNYALLKLAGDVESNPGP

SEQ ID NO: 14647 - protein, 23 aa, Artificial Sequence
  GSG E2A peptide
GSGQCTNYALLKLAGDVESNPGP

SEQ ID NO: 14648 - protein, 22 aa, Artificial Sequence
  F2A peptide
VKQTLNFDLLKLAGDVESNPGP

SEQ ID NO: 14649 - protein, 25 aa, Artificial Sequence
  GSG-F2A peptide
GSGVKQTLNFDLLKLAGDVESNPGP

SEQ ID NO: 14650 - protein, 19 aa, Artificial Sequence
  P2A peptide
ATNFSLLKQAGDVEENPGP

SEQ ID NO: 14651 - protein, 22 aa, Artificial Sequence
  GSG-P2A peptide
GSGATNFSLLKQAGDVEENPGP

SEQ ID NO: 14652 - DNA, 5296 bp, Artificial Sequence
  Helraiser transposon
tcctatataataaaagagaaacatgcaaattgaccatccctccgctacgctcaagccacgcccaccagccaatcagaagtgactatgcaaattaacccaacaaagatggcagttaaatttgcatacgcaggtgtcaagcgccccaggaggcaacggcggccgcgggctcccaggaccttcgctggccccgggaggcgaggccggccgcgcctagccacacccgcgggctcccgggaccttcgccagcagagagcagagcgggagagcgggcggagagcgggaggtttggaggacttggcagagcaggaggccgctggacatagagcagagcgagagagagggtggcttggagggcgtggctccctctgtcaccccagcttcctcatcacagctgtggaaactgacagcagggaggaggaagtcccacccccacagaatcagccagaatcagccgttggtcagacagctctcagcggcctgacagccaggactctcattcacctgcatctcagaccgtgacagtagagaggtgggactatgtctaaagaacaactgttgatacaacgtagctctgcagccgaaagatgccggcgttatcgacagaaaatgtctgcagagcaacgtgcgtctgatcttgaaagaaggcggcgcctgcaacagaatgtatctgaagagcagctactggaaaaacgtcgctctgaagccgaaaaacagcggcgtcatcgacagaaaatgtctaaagaccaacgtgcctttgaagttgaaagaaggcggtggcgacgacagaatatgtctagagaacagtcatcaacaagtactaccaataccggtaggaactgccttctcagcaaaaatggagtacatgaggatgcaattctcgaacatagttgtggtggaatgactgttcgatgtgaattttgcctatcactaaatttctctgatgaaaaaccatccgatgggaaatttactcgatgttgtagcaaagggaaagtctgtccaaatgatatacattttccagattacccggcatatttaaaaagattaatgacaaacgaagattctgacagtaaaaatttcatggaaaatattcgttccataaatagttcttttgcttttgcttccatgggtgcaaatattgcatcgccatcaggatatgggccatactgttttagaatacacggacaagtttatcaccgtactggaactttacatccttcggatggtgtttctcggaagtttgctcaactctatattttggatacagccgaagctacaagtaaaagattagcaatgccagaaaaccagggctgctcagaaagactcatgatcaacatcaacaacctcatgcatgaaataaatgaattaacaaaatcgtacaagatgctacatgaggtagaaaaggaagcccaatctgaagcagcagcaaaaggtattgctcccacagaagtaacaatggcgattaaatacgatcgtaacagtgacccaggtagatataattctccccgtgtaaccgaggttgctgtcatattcagaaacgaagatggagaacctccttttgaaagggacttgctcattcattgtaaaccagatcccaataatccaaatgccactaaaatgaaacaaatcagtatcctgtttcctacattagatgcaatgacatatcctattctttttccacatggtgaaaaaggctggggaacagatattgcattaagactcagagacaacagtgtaatcgacaataatactagacaaaatgtaaggacacgagtcacacaaatgcagtattatggatttcatctctctgtgcgggacacgttcaatcctattttaaatgcaggaaaattaactcaacagtttattgtggattcatattcaaaaatggaggccaatcggataaatttcatcaaagcaaaccaatctaagttgagagttgaaaaatatagtggtttgatggattatctcaaatctagatctgaaaatgacaatgtgccgattggtaaaatgataatacttccatcatcttttgagggtagtcccagaaatatgcagcagcgatatcaggatgctatggcaattgtaacgaagtatggcaagcccgatttattcataaccatgacatgcaaccccaaatgggcagatattacaaacaatttacaacgctggcaaaaagttgaaaacagacctgacttggtagccagagtttttaatattaagctgaatgctcttttaaatgatatatgtaaattccatttatttggcaaagtaatagctaaaattcatgtcattgaatttcagaaacgcggactgcctcacgctcacatattattgatattagatagtgagtccaaattacgttcagaagatgacattgaccgtatagttaaggcagaaattccagatgaagaccagtgtcctcgactttttcaaattgtaaaatcaaatatggtacatggaccatgtggaatacaaaatccaaatagtccatgtatggaaaatggaaaatgttcaaagggatatccaaaagaatttcaaaatgcgaccattggaaatattgatggatatcccaaatacaaacgaagatctggtagcaccatgtctattggaaataaagttgtcgataacacttggattgtcccttataacccgtatttgtgccttaaatataactgtcatataaatgttgaagtctgtgcatcaattaaaagtgtcaaatatttatttaaatacatctataaagggcacgattgtgcaaatattcaaatttctgaaaaaaatattatcaatcatgacgaagtacaggacttcattgactccaggtatgtgagcgctcctgaggctgtttggagactttttgcaatgcgaatgcatgaccaatctcatgcaatcacaagattagctattcatttgccaaatgatcagaatttgtattttcataccgatgattttgctgaagttttagatagggctaaaaggcataactcgactttgatggcttggttcttattgaatagagaagattctgatgcacgtaattattattattgggagattccacagcattatgtgtttaataattctttgtggacaaaacgccgaaagggtgggaataaagtattaggtagactgttcactgtgagctttagagaaccagaacgatattaccttagacttttgcttctgcatgtaaaaggtgcgataagttttgaggatctgcgaactgtaggaggtgtaacttatgatacatttcatgaagctgctaaacaccgaggattattacttgatgacactatctggaaagatacgattgacgatgcaatcatccttaatatgcccaaacaactacggcaactttttgcatatatatgtgtgtttggatgtccttctgctgcagacaaattatgggatgagaataaatctcattttattgaagatttctgttggaaattacaccgaagagaaggtgcctgtgtgaactgtgaaatgcatgcccttaacgaaattcaggaggtattcacattgcatggaatgaaatgttcacatttcaaacttccggactatcctttattaatgaatgcaaatacatgtgatcaattgtacgagcaacaacaggcagaggttttgataaattctctgaatgatgaacagttggcagcctttcagactataacttcagccatcgaagatcaaactgtacaccccaaatgctttttcttggatggtccaggtggtagtggaaaaacatatctgtataaagttttaacacattatattagaggtcgtggtggtactgttttacccacagcatctacaggaattgctgcaaatttacttcttggtggaagaacctttcattcccaatataaattaccaattccattaaatgaaacttcaatttctagactcgatataaagagtgaagttgctaaaaccattaaaaaggcccaacttctcattattgatgaatgcaccatggcatccagtcatgctataaacgccatagatagattactaagagaaattatgaatttgaatgttgcatttggtgggaaagttctccttctcggaggggattttcgacaatgtctcagtattgtaccacatgctatgcgatcggccatagtacaaacgagtttaaagtactgtaatgtttggggatgtttcagaaagttgtctcttaaaacaaatatgagatcagaggattctgcttatagtgaatggttagtaaaacttggagatggcaaacttgatagcagttttcatttaggaatggatattattgaaatcccccatgaaatgatttgtaacggatctattattgaagctacctttggaaatagtatatctatagataatattaaaaatatatctaaacgtgcaattctttgtccaaaaaatgagcatgttcaaaaattaaatgaagaaattttggatatacttgatggagattttcacacatatttgagtgatgattccattgattcaacagatgatgctgaaaaggaaaattttcccatcgaatttcttaatagtattactccttcgggaatgccgtgtcataaattaaaattgaaagtgggtgcaatcatcatgctattgagaaatcttaatagtaaatggggtctttgtaatggtactagatttattatcaaaagattacgacctaacattatcgaagctgaagtattaacaggatctgcagagggagaggttgttctgattccaagaattgatttgtccccatctgacactggcctcccatttaaattaattcgaagacagtttcccgtgatgccagcatttgcgatgactattaataaatcacaaggacaaactctagacagagtaggaatattcctacctgaacccgttttcgcacatggtcagttatatgttgctttctctcgagttcgaagagcatgtgacgttaaagttaaagttgtaaatacttcatcacaagggaaattagtcaagcactctgaaagtgtttttactcttaatgtggtatacagggagatattagaataagtttaatcactttatcagtcattgtttgcatcaatgttgtttttatatcatgtttttgttgtttttatatcatgtctttgttgttgttatatcatgttgttattgtttatttattaataaatttatgtattattttcatatacattttactcatttcctttcatctctcacacttctattatagagaaagggcaaatagcaatattaaaatatttcctctaattaattccctttcaatgtgcacgaatttcgtgcaccgggccactag

SEQ ID NO: 14653 - DNA, 4682 bp, Oryzias latipes
cagaggtgtaaagtacttgagtaattttacttgattactgtacttaagtattatttttggggatttttactttacttgagtacaattaaaaatcaatacttttacttttacttaattacatttttttagaaaaaaaagtactttttactccttacaattttatttacagtcaaaaagtacttattttttggagatcacttcattctattttcccttgctattaccaaaccaattgaattgcgctgatgcccagtttaatttaaatgttatttattctgcctatgaaaatcgttttcacattatatgaaattggtcagacatgttcattggtcctttggaagtgacgtcatgtcacatctattaccacaatgcacagcaccttgacctggaaattagggaaattataacagtcaatcagtggaagaaaatggaggaagtatgtgattcatcagcagctgcgagcagcacagtccaaaatcagccacaggatcaagagcacccgtggccgtatcttcgcgaattcttttctttaagtggtgtaaataaagattcattcaagatgaaatgtgtcctctgtctcccgcttaataaagaaatatcggccttcaaaagttcgccatcaaacctaaggaagcatattgaggtaagtacattaagtattttgttttactgatagtttttttttttttttttttttttttttttgggtgtgcatgttttgacgttgatggcgcgccttttatatgtgtagtaggcctattttcactaatgcatgcgattgacaatataaggctcacgtaataaaatgctaaaatgcatttgtaattggtaacgttaggtccacgggaaatttggcgcctattgcagctttgaataatcattatcattccgtgctctcattgtgtttgaattcatgcaaaacacaagaaaaccaagcgagaaatttttttccaaacatgttgtattgtcaaaacggtaacactttacaatgaggttgattagttcatgtattaactaacattaaataaccatgagcaatacatttgttactgtatctgttaatctttgttaacgttagttaatagaaatacagatgttcattgtttgttcatgttagttcacagtgcattaactaatgttaacaagatataaagtattagtaaatgttgaaattaacatgtatacgtgcagttcattattagttcatgttaactaatgtagttaactaacgaaccttattgtaaaagtgttaccatcaaaactaatgtaatgaaatcaattcaccctgtcatgtcagccttacagtcctgtgtttttgtcaatataatcagaaataaaattaatgtttgattgtcactaaatgctactgtatttctaaaatcaacaagtatttaacattataaagtgtgcaattggctgcaaatgtcagttttattaaagggttagttcacccaaaaatgaaaataatgtcattaatgactcgccctcatgtcgttccaagcccgtaagacctccgttcatcttcagaacacagtttaagatattttagatttagtccgagagctttctgtgcctccattgagaatgtatgtacggtatactgtccatgtccagaaaggtaataaaaacatcaaagtagtccatgtgacatcagtgggttagttagaattttttgaagcatcgaatacattttggtccaaaaataacaaaacctacgactttattcggcattgtattctcttccgggtctgttgtcaatccgcgttcacgacttcgcagtgacgctacaatgctgaataaagtcgtaggttttgttatttttggaccaaaatgtattttcgatgcttcaaataattctacctaacccactgatgtcacatggactactttgatgtttttattacctttctggacatggacagtataccgtacatacattttcagtggagggacagaaagctctcggactaaatctaaaatatcttaaactgtgttccgaagatgaacggaggtgttacgggcttggaacgacatgagggtgagtcattaatgacatcttttcatttttgggtgaactaaccctttaatgctgtaatcagagagtgtatgtgtaattgttacatttattgcatacaatataaatatttatttgttgtttttacagagaatgcacccaaattacctcaaaaactactctaaattgacagcacagaagagaaagatcgggacctccacccatgcttccagcagtaagcaactgaaagttgactcagttttcccagtcaaacatgtgtctccagtcactgtgaacaaagctatattaaggtacatcattcaaggacttcatcctttcagcactgttgatctgccatcatttaaagagctgattagtacactgcagcctggcatttctgtcattacaaggcctactttacgctccaagatagctgaagctgctctgatcatgaaacagaaagtgactgctgccatgagtgaagttgaatggattgcaaccacaacggattgttggactgcacgtagaaagtcattcattggtgtaactgctcactggatcaaccctggaagtcttgaaagacattccgctgcacttgcctgcaaaagattaatgggctctcatacttttgaggtactggccagtgccatgaatgatatccactcagagtatgaaatacgtgacaaggttgtttgcacaaccacagacagtggttccaactttatgaaggctttcagagtttttggtgtggaaaacaatgatatcgagactgaggcaagaaggtgtgaaagtgatgacactgattctgaaggctgtggtgagggaagtgatggtgtggaattccaagatgcctcacgagtcctggaccaagacgatggcttcgaattccagctaccaaaacatcaaaagtgtgcctgtcacttacttaacctagtctcaagcgttgatgcccaaaaagctctctcaaatgaacactacaagaaactctacagatctgtctttggcaaatgccaagctttatggaataaaagcagccgatcggctctagcagctgaagctgttgaatcagaaagccggcttcagcttttaaggccaaaccaaacgcggtggaattcaacttttatggctgttgacagaattcttcaaatttgcaaagaagcaggagaaggcgcacttcggaatatatgcacctctcttgaggttccaatgtaagtgtttttcccctctatcgatgtaaacaaatgtgggttgtttttgtttaatactctttgattatgctgatttctcctgtaggtttaatccagcagaaatgctgttcttgacagagtgggccaacacaatgcgtccagttgcaaaagtactcgacatcttgcaagcggaaacgaatacacagctggggtggctgctgcctagtgtccatcagttaagcttgaaacttcagcgactccaccattctctcaggtactgtgacccacttgtggatgccctacaacaaggaatccaaacacgattcaagcatatgtttgaagatcctgagatcatagcagctgccatccttctccctaaatttcggacctcttggacaaatgatgaaaccatcataaaacgaggtaaatgaatgcaagcaacatacacttgacgaattctaatctgggcaacctttgagccataccaaaattattcttttatttatttatttttgcactttttaggaatgttatatcccatctttggctgtgatctcaatatgaatattgatgtaaagtattcttgcagcaggttgtagttatccctcagtgtttcttgaaaccaaactcatatgtatcatatgtggtttggaaatgcagttagattttatgctaaaataagggatttgcatgattttagatgtagatgactgcacgtaaatgtagttaatgacaaaatccataaaatttgttcccagtcagaagcccctcaaccaaacttttctttgtgtctgctcactgtgcttgtaggcatggactacatcagagtgcatctggagcctttggaccacaagaaggaattggccaacagttcatctgatgatgaagattttttcgcttctttgaaaccgacaacacatgaagccagcaaagagttggatggatatctggcctgtgtttcagacaccagggagtctctgctcacgtttcctgctatttgcagcctctctatcaagactaatacacctcttcccgcatcggctgcctgtgagaggcttttcagcactgcaggattgcttttcagccccaaaagagctaggcttgacactaacaattttgagaatcagcttctactgaagttaaatctgaggttttacaactttgagtagcgtgtactggcattagattgtctgtcttatagtttgataattaaatacaaacagttctaaagcaggataaaaccttgtatgcatttcatttaatgttttttgagattaaaagcttaaacaagaatctctagttttctttcttgcttttacttttacttccttaatactcaagtacaattttaatggagtacttttttacttttactcaagtaagattctagccagatacttttacttttaattgagtaaaattttccctaagtacttgtactttcacttgagtaaaatttttgagtactttttacacctctg

SEQ ID NO: 14654 - protein, 1591 aa, Artificial Sequence
  dCas9-Clo051 fusion
MAPKKKRKVEGIKSNISLLKDELRGQISHISHEYLSLIDLAFDSKQNRLFEMKVLELLVNEYGFKGRHLGGSRKPDGIVYSTTLEDNFGIIVDTKAYSEGYSLPISQADEMERYVRENSNRDEEVNPNKWWENFSEEVKKYYFVFISGSFKGKFEEQLRRLSMTTGVNGSAVNVVNLLLGAEKIRSGEMTIEELERAMFNNSEFILKYGGGGSDKKYSIGLAIGTNSVGWAVITDEYKVPSKKFKVLGNTDRHSIKKNLIGALLFDSGETAEATRLKRTARRRYTRRKNRICYLQEIFSNEMAKVDDSFFHRLEESFLVEEDKKHERHPIFGNIVDEVAYHEKYPTIYHLRKKLVDSTDKADLRLIYLALAHMIKFRGHFLIEGDLNPDNSDVDKLFIQLVQTYNQLFEENPINASGVDAKAILSARLSKSRRLENLIAQLPGEKKNGLFGNLIALSLGLTPNFKSNFDLAEDAKLQLSKDTYDDDLDNLLAQIGDQYADLFLAAKNLSDAILLSDILRVNTEITKAPLSASMIKRYDEHHQDLTLLKALVRQQLPEKYKEIFFDQSKNGYAGYIDGGASQEEFYKFIKPILEKMDGTEELLVKLNREDLLRKQRTFDNGSIPHQIHLGELHAILRRQEDFYPFLKDNREKIEKILTFRIPYYVGPLARGNSRFAWMTRKSEETITPWNFEEVVDKGASAQSFIERMTNFDKNLPNEKVLPKHSLLYEYFTVYNELTKVKYVTEGMRKPAFLSGEQKKAIVDLLFKTNRKVTVKQLKEDYFKKIECFDSVEISGVEDRFNASLGTYHDLLKIIKDKDFLDNEENEDILEDIVLTLTLFEDREMIEERLKTYAHLFDDKVMKQLKRRRYTGWGRLSRKLINGIRDKQSGKTILDFLKSDGFANRNFMQLIHDDSLTFKEDIQKAQVSGQGDSLHEHIANLAGSPAIKKGILQTVKVVDELVKVMGRHKPENIVIEMARENQTTQKGQKNSRERMKRIEEGIKELGSQILKEHPVENTQLQNEKLYLYYLQNGRDMYVDQELDINRLSDYDVDAIVPQSFLKDDSIDNKVLTRSDKNRGKSDNVPSEEVVKKMKNYWRQLLNAKLITQRKFDNLTKAERGGLSELDKAGFIKRQLVETRQITKHVAQILDSRMNTKYDENDKLIREVKVITLKSKLVSDFRKDFQFYKVREINNYHHAHDAYLNAVVGTALIKKYPKLESEFVYGDYKVYDVRKMIAKSEQEIGKATAKYFFYSNIMNFFKTEITLANGEIRKRPLIETNGETGEIVWDKGRDFATVRKVLSMPQVNIVKKTEVQTGGFSKESILPKRNSDKLIARKKDWDPKKYGGFDSPTVAYSVLVVAKVEKGKSKKLKSVKELLGITIMERSSFEKNPIDFLEAKGYKEVKKDLIIKLPKYSLFELENGRKRMLASAGELQKGNELALPSKYVNFLYLASHYEKLKGSPEDNEQKQLFVEQHKHYLDEIIEQISEFSKRVILADANLDKVLSAYNKHRDKPIREQAENIIHLFTLTNLGAPAAFKYFDTTIDRKRYTSTKEVLDATLIHQSITGLYETRIDLSQLGGDGSPKKKRKVSS

SEQ ID NO: 14655 - DNA, 4776 bp, Artificial Sequence
  dCas9-Clo051
atggcaccaaagaagaaaagaaaagtggagggcatcaagtcaaacatcagcctgctgaaagacgaactgcggggacagattagtcacatcagtcacgagtacctgtcactgattgatctggccttcgacagcaagcagaatagactgtttgagatgaaagtgctggaactgctggtcaacgagtatggcttcaagggcagacatctgggcgggtctaggaaacctgacggcatcgtgtacagtaccacactggaagacaacttcggaatcattgtcgataccaaggcttattccgagggctactctctgccaattagtcaggcagatgagatggaaaggtacgtgcgcgaaaactcaaatagggacgaggaagtcaaccccaataagtggtgggagaatttcagcgaggaagtgaagaaatactacttcgtctttatctcaggcagcttcaaagggaagtttgaggaacagctgcggagactgtccatgactaccggggtgaacggatctgctgtcaacgtggtcaatctgctgctgggcgcagaaaagatcaggtccggggagatgacaattgaggaactggaacgcgccatgttcaacaattctgagtttatcctgaagtatggaggcgggggaagcgataagaaatactccatcggactggccattggcaccaattccgtgggctgggctgtcatcacagacgagtacaaggtgccaagcaagaagttcaaggtcctggggaacaccgatcgccacagtatcaagaaaaatctgattggagccctgctgttcgactcaggcgagactgctgaagcaacccgactgaagcggactgctaggcgccgatatacccggagaaaaaatcggatctgctacctgcaggaaattttcagcaacgagatggccaaggtggacgatagtttctttcaccgcctggaggaatcattcctggtggaggaagataagaaacacgagcggcatcccatctttggcaacattgtggacgaagtcgcttatcacgagaagtaccctactatctatcatctgaggaagaaactggtggactccaccgataaggcagacctgcgcctgatctatctggccctggctcacatgatcaagttccgggggcattttctgatcgagggagatctgaaccctgacaattctgatgtggacaagctgttcatccagctggtccagacatacaatcagctgtttgaggaaaacccaattaatgcctcaggcgtggacgcaaaggccatcctgagcgccagactgtccaaatctaggcgcctggaaaacctgatcgctcagctgccaggagagaagaaaaacggcctgtttgggaatctgattgcactgtccctgggcctgacacccaacttcaagtctaattttgatctggccgaggacgctaagctgcagctgtccaaagacacttatgacgatgacctggataacctgctggctcagatcggcgatcagtacgcagacctgttcctggccgctaagaatctgagtgacgccatcctgctgtcagatattctgcgcgtgaacacagagattactaaggccccactgagtgcttcaatgatcaaaagatatgacgagcaccatcaggatctgaccctgctgaaggctctggtgaggcagcagctgcccgagaaatacaaggaaatcttctttgatcagagcaagaatggatacgccggctatattgacggcggggcttcccaggaggagttctacaagttcatcaagcccattctggaaaagatggacggcaccgaggaactgctggtgaagctgaatcgggaggacctgctgagaaaacagaggacatttgataacggaagcatccctcaccagattcatctgggcgaactgcacgccatcctgcgacggcaggaggacttctacccatttctgaaggataaccgcgagaaaatcgaaaagatcctgaccttcagaatcccctactatgtggggcctctggcacggggaaatagtagatttgcctggatgacaagaaagtcagaggaaactatcaccccctggaacttcgaggaagtggtcgataaaggcgctagcgcacagtccttcattgaaaggatgacaaattttgacaagaacctgccaaatgagaaggtgctgcccaaacacagcctgctgtacgaatatttcacagtgtataacgagctgactaaagtgaagtacgtcaccgaagggatgcgcaagcccgcattcctgtccggagagcagaagaaagccatcgtggacctgctgtttaagacaaatcggaaagtgactgtcaaacagctgaaggaagactatttcaagaaaattgagtgtttcgattcagtggaaatcagcggcgtcgaggacaggtttaacgcctccctggggacctaccacgatctgctgaagatcatcaaggataaggacttcctggacaacgaggaaaatgaggacatcctggaggacattgtgctgacactgactctgtttgaggatcgcgaaatgatcgaggaacgactgaagacttatgcccatctgttcgatgacaaagtgatgaagcagctgaaaagaaggcgctacaccggatggggacgcctgagccgaaaactgatcaatgggattagagacaagcagagcggaaaaactatcctggactttctgaagtccgatggcttcgccaacaggaacttcatgcagctgattcacgatgactctctgaccttcaaggaggacatccagaaagcacaggtgtctggccagggggacagtctgcacgagcatatcgcaaacctggccggcagccccgccatcaagaaagggattctgcagaccgtgaaggtggtggacgaactggtcaaggtcatgggacgacacaaacctgagaacatcgtgattgagatggcccgcgaaaatcagacaactcagaagggccagaaaaacagtcgagaacggatgaagagaatcgaggaaggcatcaaggagctggggtcacagatcctgaaggagcatcctgtggaaaacactcagctgcagaatgagaaactgtatctgtactatctgcagaatggacgggatatgtacgtggaccaggagctggatattaacagactgagtgattatgacgtggatgccatcgtccctcagagcttcctgaaggatgactccattgacaacaaggtgctgaccaggtccgacaagaaccgcggcaaatcagataatgtgccaagcgaggaagtggtcaagaaaatgaagaactactggaggcagctgctgaatgccaagctgatcacacagcggaaatttgataacctgactaaggcagaaagaggaggcctgtctgagctggacaaggccggcttcatcaagcggcagctggtggagacaagacagatcactaagcacgtcgctcagattctggatagcagaatgaacacaaagtacgatgaaaacgacaagctgatcagggaggtgaaagtcattactctgaaatccaagctggtgtctgactttagaaaggatttccagttttataaagtcagggagatcaacaactaccaccatgctcatgacgcatacctgaacgcagtggtcgggaccgccctgattaagaaataccccaagctggagtccgagttcgtgtacggagactataaagtgtacgatgtccggaagatgatcgccaaatctgagcaggaaattggcaaggccaccgctaagtatttcttttacagtaacatcatgaatttctttaagaccgaaatcacactggcaaatggggagatcagaaaaaggcctctgattgagaccaacggggagacaggagaaatcgtgtgggacaagggaagggattttgctaccgtgcgcaaagtcctgtccatgccccaagtgaatattgtcaagaaaactgaagtgcagaccgggggattctctaaggagagtattctgcctaagcgaaactctgataaactgatcgcccggaagaaagactgggaccccaagaagtatggcgggttcgactctccaacagtggcttacagtgtcctggtggtcgcaaaggtggaaaaggggaagtccaagaaactgaagtctgtcaaagagctgctgggaatcactattatggaacgcagctccttcgagaagaatcctatcgattttctggaagccaagggctataaagaggtgaagaaagacctgatcattaagctgccaaaatactcactgtttgagctggaaaacggacgaaagcgaatgctggcaagcgccggagaactgcagaagggcaatgagctggccctgccctccaaatacgtgaacttcctgtatctggctagccactacgagaaactgaaggggtcccctgaggataacgaacagaagcagctgtttgtggagcagcacaaacattatctggacgagatcattgaacagatttcagagttcagcaagagagtgatcctggctgacgcaaatctggataaagtcctgagcgcatacaacaagcaccgagacaaaccaatccgggagcaggccgaaaatatcattcatctgttcaccctgacaaacctgggcgcccctgcagccttcaagtattttgacaccacaatcgatcggaagagatacacttctaccaaagaggtgctggatgctaccctgatccaccagagtattaccggcctgtatgagacacgcatcgacctgtcacagctgggaggcgatgggagccccaagaaaaagcggaaggtgtctagttaa

SEQ ID NO: 14656 - protein, 1588 aa, Artificial Sequence
  dCas9-Clo051 fusion protein
MPKKKRKVEGIKSNISLLKDELRGQISHISHEYLSLIDLAFDSKQNRLFEMKVLELLVNEYGFKGRHLGGSRKPDGIVYSTTLEDNFGIIVDTKAYSEGYSLPISQADEMERYVRENSNRDEEVNPNKWWENFSEEVKKYYFVFISGSFKGKFEEQLRRLSMTTGVNGSAVNVVNLLLGAEKIRSGEMTIEELERAMFNNSEFILKYGGGGSDKKYSIGLAIGTNSVGWAVITDEYKVPSKKFKVLGNTDRHSIKKNLIGALLFDSGETAEATRLKRTARRRYTRRKNRICYLQEIFSNEMAKVDDSFFHRLEESFLVEEDKKHERHPIFGNIVDEVAYHEKYPTIYHLRKKLVDSTDKADLRLIYLALAHMIKFRGHFLIEGDLNPDNSDVDKLFIQLVQTYNQLFEENPINASGVDAKAILSARLSKSRRLENLIAQLPGEKKNGLFGNLIALSLGLTPNFKSNFDLAEDAKLQLSKDTYDDDLDNLLAQIGDQYADLFLAAKNLSDAILLSDILRVNTEITKAPLSASMIKRYDEHHQDLTLLKALVRQQLPEKYKEIFFDQSKNGYAGYIDGGASQEEFYKFIKPILEKMDGTEELLVKLNREDLLRKQRTFDNGSIPHQIHLGELHAILRRQEDFYPFLKDNREKIEKILTFRIPYYVGPLARGNSRFAWMTRKSEETITPWNFEEVVDKGASAQSFIERMTNFDKNLPNEKVLPKHSLLYEYFTVYNELTKVKYVTEGMRKPAFLSGEQKKAIVDLLFKTNRKVTVKQLKEDYFKKIECFDSVEISGVEDRFNASLGTYHDLLKIIKDKDFLDNEENEDILEDIVLTLTLFEDREMIEERLKTYAHLFDDKVMKQLKRRRYTGWGRLSRKLINGIRDKQSGKTILDFLKSDGFANRNFMQLIHDDSLTFKEDIQKAQVSGQGDSLHEHIANLAGSPAIKKGILQTVKVVDELVKVMGRHKPENIVIEMARENQTTQKGQKNSRERMKRIEEGIKELGSQILKEHPVENTQLQNEKLYLYYLQNGRDMYVDQELDINRLSDYDVDAIVPQSFLKDDSIDNKVLTRSDKNRGKSDNVPSEEVVKKMKNYWRQLLNAKLITQRKFDNLTKAERGGLSELDKAGFIKRQLVETRQITKHVAQILDSRMNTKYDENDKLIREVKVITLKSKLVSDFRKDFQFYKVREINNYHHAHDAYLNAVVGTALIKKYPKLESEFVYGDYKVYDVRKMIAKSEQEIGKATAKYFFYSNIMNFFKTEITLANGEIRKRPLIETNGETGEIVWDKGRDFATVRKVLSMPQVNIVKKTEVQTGGFSKESILPKRNSDKLIARKKDWDPKKYGGFDSPTVAYSVLVVAKVEKGKSKKLKSVKELLGITIMERSSFEKNPIDFLEAKGYKEVKKDLIIKLPKYSLFELENGRKRMLASAGELQKGNELALPSKYVNFLYLASHYEKLKGSPEDNEQKQLFVEQHKHYLDEIIEQISEFSKRVILADANLDKVLSAYNKHRDKPIREQAENIIHLFTLTNLGAPAAFKYFDTTIDRKRYTSTKEVLDATLIHQSITGLYETRIDLSQLGGDGSPKKKRKV

SEQ ID NO: 14657 - DNA, 4767 bp, Artificial Sequence
  dCas9-Clo051
atgcctaagaagaagcggaaggtggaaggcatcaaaagcaacatctccctcctgaaagacgaactccgggggcagattagccacattagtcacgaatacctctccctcatcgacctggctttcgatagcaagcagaacaggctctttgagatgaaagtgctggaactgctcgtcaatgagtacgggttcaagggtcgacacctcggcggatctaggaaaccagacggcatcgtgtatagtaccacactggaagacaactttgggatcattgtggataccaaggcatactctgagggttatagtctgcccatttcacaggccgacgagatggaacggtacgtgcgcgagaactcaaatagagatgaggaagtcaaccctaacaagtggtgggagaacttctctgaggaagtgaagaaatactacttcgtctttatcagcgggtccttcaagggtaaatttgaggaacagctcaggagactgagcatgactaccggcgtgaatggcagcgccgtcaacgtggtcaatctgctcctgggcgctgaaaagattcggagcggagagatgaccatcgaagagctggagagggcaatgtttaataatagcgagtttatcctgaaatacggtggcggtggatccgataaaaagtattctattggtttagccatcggcactaattccgttggatgggctgtcataaccgatgaatacaaagtaccttcaaagaaatttaaggtgttggggaacacagaccgtcattcgattaaaaagaatcttatcggtgccctcctattcgatagtggcgaaacggcagaggcgactcgcctgaaacgaaccgctcggagaaggtatacacgtcgcaagaaccgaatatgttacttacaagaaatttttagcaatgagatggccaaagttgacgattctttctttcaccgtttggaagagtccttccttgtcgaagaggacaagaaacatgaacggcaccccatctttggaaacatagtagatgaggtggcatatcatgaaaagtacccaacgatttatcacctcagaaaaaagctagttgactcaactgataaagcggacctgaggttaatctacttggctcttgcccatatgataaagttccgtgggcactttctcattgagggtgatctaaatccggacaactcggatgtcgacaaactgttcatccagttagtacaaacctataatcagttgtttgaagagaaccctataaatgcaagtggcgtggatgcgaaggctattcttagcgcccgcctctctaaatcccgacggctagaaaacctgatcgcacaattacccggagagaagaaaaatgggttgttcggtaaccttatagcgctctcactaggcctgacaccaaattttaagtcgaacttcgacttagctgaagatgccaaattgcagcttagtaaggacacgtacgatgacgatctcgacaatctactggcacaaattggagatcagtatgcggacttatttttggctgccaaaaaccttagcgatgcaatcctcctatctgacatactgagagttaatactgagattaccaaggcgccgttatccgcttcaatgatcaaaaggtacgatgaacatcaccaagacttgacacttctcaaggccctagtccgtcagcaactgcctgagaaatataaggaaatattctttgatcagtcgaaaaacgggtacgcaggttatattgacggcggagcgagtcaagaggaattctacaagtttatcaaacccatattagagaagatggatgggacggaagagttgcttgtaaaactcaatcgcgaagatctactgcgaaagcagcggactttcgacaacggtagcattccacatcaaatccacttaggcgaattgcatgctatacttagaaggcaggaggatttttatccgttcctcaaagacaatcgtgaaaagattgagaaaatcctaacctttcgcataccttactatgtgggacccctggcccgagggaactctcggttcgcatggatgacaagaaagtccgaagaaacgattactccatggaattttgaggaagttgtcgataaaggtgcgtcagctcaatcgttcatcgagaggatgaccaactttgacaagaatttaccgaacgaaaaagtattgcctaagcacagtttactttacgagtatttcacagtgtacaatgaactcacgaaagttaagtatgtcactgagggcatgcgtaaacccgcctttctaagcggagaacagaagaaagcaatagtagatctgttattcaagaccaaccgcaaagtgacagttaagcaattgaaagaggactactttaagaaaattgaatgcttcgattctgtcgagatctccggggtagaagatcgatttaatgcgtcacttggtacgtatcatgacctcctaaagataattaaagataaggacttcctggataacgaagagaatgaagatatcttagaagatatagtgttgactcttaccctctttgaagatcgggaaatgattgaggaaagactaaaaacatacgctcacctgttcgacgataaggttatgaaacagttaaagaggcgtcgctatacgggctggggacgattgtcgcggaaacttatcaacgggataagagacaagcaaagtggtaaaactattctcgattttctaaagagcgacggcttcgccaataggaactttatgcagctgatccatgatgactctttaaccttcaaagaggatatacaaaaggcacaggtttccggacaaggggactcattgcacgaacatattgcgaatcttgctggttcgccagccatcaaaaagggcatactccagacagtcaaagtagtggatgagctagttaaggtcatgggacgtcacaaaccggaaaacattgtaatcgagatggcacgcgaaaatcaaacgactcagaaggggcaaaaaaacagtcgagagcggatgaagagaatagaagagggtattaaagaactgggcagccagatcttaaaggagcatcctgtggaaaatacccaattgcagaacgagaaactttacctctattacctacaaaatggaagggacatgtatgttgatcaggaactggacataaaccgtttatctgattacgacgtcgatgccattgtaccccaatcctttttgaaggacgattcaatcgacaataaagtgcttacacgctcggataagaaccgagggaaaagtgacaatgttccaagcgaggaagtcgtaaagaaaatgaagaactattggcggcagctcctaaatgcgaaactgataacgcaaagaaagttcgataacttaactaaagctgagaggggtggcttgtctgaacttgacaaggccggatttattaaacgtcagctcgtggaaacccgccaaatcacaaagcatgttgcacagatactagattcccgaatgaatacgaaatacgacgagaacgataagctgattcgggaagtcaaagtaatcactttaaagtcaaaattggtgtcggacttcagaaaggattttcaattctataaagttagggagataaataactaccaccatgcgcacgacgcttatcttaatgccgtcgtagggaccgcactcattaagaaatacccgaagctagaaagtgagtttgtgtatggtgattacaaagtttatgacgtccgtaagatgatcgcgaaaagcgaacaggagataggcaaggctacagccaaatacttcttttattctaacattatgaatttctttaagacggaaatcactctggcaaacggagagatacgcaaacgacctttaattgaaaccaatggggagacaggtgaaatcgtatgggataagggccgggacttcgcgacggtgagaaaagttttgtccatgccccaagtcaacatagtaaagaaaactgaggtgcagaccggagggttttcaaaggaatcgattcttccaaaaaggaatagtgataagctcatcgctcgtaaaaaggactgggacccgaaaaagtacggtggcttcgatagccctacagttgcctattctgtcctagtagtggcaaaagttgagaagggaaaatccaagaaactgaagtcagtcaaagaattattggggataacgattatggagcgctcgtcttttgaaaagaaccccatcgacttccttgaggcgaaaggttacaaggaagtaaaaaaggatctcataattaaactaccaaagtatagtctgtttgagttagaaaatggccgaaaacggatgttggctagcgccggagagcttcaaaaggggaacgaactcgcactaccgtctaaatacgtgaatttcctgtatttagcgtcccattacgagaagttgaaaggttcacctgaagataacgaacagaagcaactttttgttgagcagcacaaacattatctcgacgaaatcatagagcaaatttcggaattcagtaagagagtcatcctagctgatgccaatctggacaaagtattaagcgcatacaacaagcacagggataaacccatacgtgagcaggcggaaaatattatccatttgtttactcttaccaacctcggcgctccagccgcattcaagtattttgacacaacgatagatcgcaaacgatacacttctaccaaggaggtgctagacgcgacactgattcaccaatccatcacgggattatatgaaactcggatagatttgtcacagcttgggggtgacggatcccccaagaagaagaggaaagtctga

SEQ ID NO: 14658 - protein, 1053 aa, Artificial Sequence; identical to SEQ ID NO: 14497
  dSaCas9

SEQ ID NO: 14659 - protein, 112 aa, Homo sapiens
RVKFSRSADAPAYKQGQNQLYNELNLGRREEYDVLDKRRGRDPEMGGKPRRKNPQEGLYNELQKDKMAEAYSEIGMKGERRRGKGHDGLYQGLSTATKDTYDALHMQALPPR

SEQ ID NO: 14660 - DNA, 336 bp, Artificial Sequence
  CD28 costimulatory domain
cgcgtgaagtttagtcgatcagcagatgccccagcttacaaacagggacagaaccagctgtataacgagctgaatctgggccgccgagaggaatatgacgtgctggataagcggagaggacgcgaccccgaaatgggaggcaagcccaggcgcaaaaaccctcaggaaggcctgtataacgagctgcagaaggacaaaatggcagaagcctattctgagatcggcatgaagggggagcgacggagaggcaaagggcacgatgggctgtaccagggactgagcaccgccacaaaggacacctatgatgctctgcatatgcaggcactgcctccaagg

SEQ ID NO: 14661 - protein, 42 aa, Artificial Sequence
  4-1BB costimulatory domain
KRGRKKLLYIFKQPFMRPVQTTQEEDGCSCRFPEEEEGGCEL

SEQ ID NO: 14662 - DNA, 126 bp, Artificial Sequence
  4-1BB costimulatory domain
aagagaggcaggaagaaactgctgtatattttcaaacagcccttcatgcgccccgtgcagactacccaggaggaagacgggtgctcctgtcgattccctgaggaagaggaaggcgggtgtgagctg

SEQ ID NO: 14663 - protein, 45 aa, Artificial Sequence
  CD8alpha hinge
TTTPAPRPPTPAPTIASQPLSLRPEACRPAAGGAVHTRGLDFACD

SEQ ID NO: 14664 - DNA, 135 bp, Artificial Sequence
  CD8alpha hinge
actaccacaccagcacctagaccaccaactccagctccaaccatcgcgagtcagcccctgagtctgagacctgaggcctgcaggccagctgcaggaggagctgtgcacaccaggggcctggacttcgcctgcgac

SEQ ID NO: 14665 - protein, 15 aa, Artificial Sequence
  linker
GGGGSGGGGSGGGGS

SEQ ID NO: 14666 - protein, 594 aa, Trichoplusia ni; identical to SEQ ID NO: 14487

SEQ ID NO: 14667 - DNA, 2488 bp, Ctenoplusia agnata
ccctagaagcccaatctacgtcattctgacgtgtatgtcgccgaaaatactctgtctctttctcctgcacgatcggattgccgcgaacgctcgattcaacccagttggcgccgagatctattggaggactgcggcgttgattcggtaagtcccgccattttgtcatagtaacagtattgcacgtcagcttgacgtatatttgggctttgtgttatttttgtaaattttcaacgttagtttattattgcatctttttgttacattactggtttatttgcatgtattactcaaatattatttttattttagcgtagaaaatacaatggcgtctcgtcaacatttataccaggatgaaatagcagcaatactggaaaatgaagatgattattctcctcacgataccgactctgaaatggaagattgtgttacccaagatgatgtcaggagtgacgttgaagacgagatggtggataatattggcaatggtacgagtccagcaagtaggcacgaggatcctgagacccctgacccgtcatcagaagcttctaatcttgaggtaactttatcttcacacagaattattatattacctcagcgttcgattcgtgaaaagaataatcacatttggtctacaacaaaaggtcagtcttctggtaggactgctgctataaatattgtacgtaccaatagaggacctactcgaatgtgtagaaacattgtcgatccattactctgctttcaactttttataaaagaagagattgttgaggaaattgtcaagtggacaaacgtggaaatggtacaaaaacgtgtaaacctgaaggacatctcagcaagttatagggataccaatgaaatggaaatctgggctattataagtatgctcaccttatcggccgttatgaaagacaatcatctgtctactgacgagttgttcaatgtctcctatggcactcgatacgtttcagtaatgagtcgagagagatttgaatttctattgcgattattgagaatgggtgataaattactgagaccaaatttacgccaagaggatgctttcacacctgtgagaaaaatatgggagatttttatcaaccaatgtagactgaattacgtacctggcactaacttgactgtcgatgaacagttgttaggttttcgcggccgttgtcctttccggatgtatattccgaacaaaccggacaaatatggtattaaatttcctatggtatgtgatgctgctacaaagtacatggtagatgctatcccttatctaggcaaaagcactaagacacaaggtctgccattaggcgagttttatgtgaaggagctgactcaaacagtacacggaacaaacagaaatgtcacttgtgacaactggttcacgtctgttccattagctaagagtttgctaaacagtccatataatttaacgctagtgggaaccatcaggtcaaacaagagggagataccagaagaagtcaagaactcacgttcgcggcaggtaggttcgtcaatgttttgttttgatggccctctgacattagtttcctataaacccaagccgtcaaagatggtattcttattatcatcatgtaatgaagatgccgtggtcaatcaaagtaatgggaagccggatatgatattattttacaatcagaccaaaggaggtgttgattcatttgaccagatgtgttcatctatgtcgacaaataggaagactaataggtggcctatggcagtcttttacggcatgttgaatatggcatttgtcaattcctacattatatactgccataacatgttggctaaaaaagaaaaacctctaagtcgcaaagattttatgaaaaaattaagcacagacttgacaacaccgtcgatgcaaaaacgtctggaggctcctactttgaagcggtccttacgtgataacataacaaatgttttaaaaattgtaccacaggcagccatagatacttcatttgatgaaccagagccgaagaaaaggcgctattgtggattttgctcatataaaaaaaagagaatgacaaagacacagtgcttcaagtgcaaaaaaccagtatgtggagagcacaatattgatgtttgtcaagactgcatataaagactgttttttttgtatttgcattatatattatattctaaagttgatttaattctaagaaaaacattaaaataagtttctttttgtaaaatttaattaattataagaaaaagtttaagttgatctcattttttataaaaatttgcaatgtttccaaagttattattgtaaaagaataaataaaagtaaactgagttttaattgatgttttattatatcattatactatatattacttaaataaaacaataactgaatgtatttctaaaaggaatcactagaaaatatagtgatcaaaaatttacacgtcatttttgcgtatgattgggctttataggttctaaaaatatgattgggcctctaggg

SEQ ID NO: 14668 - protein, 591 aa, Anopheles gambiae
MGDAMHVQWLSEETEEVPENEEDMLYEDVEYIEEYVHFPDGPESNVSGSVAVQNEESTGHVIKIESIDHAFDMLQNSVWSIKPPERTGTMGRKVAHPRPAPVGLAKSAKSPAECLSLFLDADVIAMITEYTNEQIKAEQPNYARERDANPTDEMEIMALLGVLYIAGTVRDGRENIERLFDTKMGTGLEAVYLTMTSLRYHFLIRSIRFDDPTAAPDEIEGDKLAPIRPIYERIVSNCQKYLRPGRFLMLDEQAVQFKGKCEFRQILPSAPGRAGFRFHLLVDCETSYVSNLEICVPENQNPYNLSYAPTDVAMRLTEPVQGRQKTVILGAGLTSIDLIEKLYASRTMAMGEVPKSYPDLPKALIANKGRPEHSTLAAYHDPATLVSYVTRRKEVMLLMSSFVDFDSEEQAGEQDEGEQHLKLVELYNRTKTTIRTIQQMCAKHNVVRSTRRWPVAVFFNLMNLSAINAWCIYCLNHPEEAKMSRRDFLVTMALELLRPQARRRLDSKTLPRLLRQRIGLFLGISREEYETVPVVERQGGESRGRCYLCGRARNKTTRISCHSCGKYTCNAHCAQLCRTCYMDDCASEQQE

SEQ ID NO: 14669 - protein, 565 aa, Anopheles gambiae
MADNLNNIPNCFPNNEDSSSDSDHDAKSDESDMENNIEEVMQASIMEELDEDSQEQATGRCVNALEARSSWKPWAGKQKPFPFFRKKRLRVDLPAKSTPYEIFSLILDDKLVAHIALAMNLYMEKKNAQKSKASKWLETNPKEVRKFIGLMIWMDLVRVGRLEDYWSESALYNFAVPRAAMYRERFRALLGAFCFYDDGTSKTDYKEPGKIGAFIDVLQSKFQALLHLGEDVVVREMLALGRDRTSFKQYIPASAHRHGRWALFKLCSLEGYTWGLKLCTEQRLIGEAQLANSVCMELCEPLLNQGRTVYIDNFHASFDLAQALLANQTHLVGTVRVNGSSMPKDVLLAKLRKGEIIARENDDGVMVLKWKGTCTMGLLSTKHSPALVPMESQVRSNRRWIRVARIQPEAVIAHIQAKGRPDRSDAIGPHITDLRKGMKWYKQVGLVLLLQVCVTNAWILHRMVTKKKLKLATFREQLVDQLVPLPNPTVERGLSGGEKKYTHHLEVRTDGNGRTVRRSCANCYAESRKTMSHYEAGRNKKATTTFCGSCPKQPQLCMPCFNKLH

SEQ ID NO: 14670 - protein, 500 aa, Anopheles gambiae
MFPLPSNCDPVFTMAALGPYVVIEPLDSEYVVNDTGPAACAEATPNTDGGGEPEQQSDDDDLICLWEEPQTFGIFDEPVGTNVPFDGADERTASEYAALVCDDALFDILVKGTNRHRKQWADCMRAGGQSVEPYRKVTVAEMKRYVGLLLVMGQVRKDCQHCYWSTNPLLETPVFANTMSYKRFQQISHYFHGMKQANRTYDAKPVLDHLVPKFQALYAPKQQLIVSELTIPQDVLNGQQTEPPNHSEDAQGSTPESAKRLRLLCESDTGYVLNVELANQQLDQVALTDVSIVRPYFGRWHHVYWGNDGITVAAAETLYANQTLACGTLRNDPDGTVAPERKSPVLVMDGQGKRILSTIHGAAAMQPTEGEPQGPPPACVADLNRHLADLERFEGLLVEEYLSNASVGWHIRTVLLLINVALLNAYILFSQTDTGSRFTFNVFRLAVAREWVGASEPLEEPTKFLPLIRGRKRKFLPLIPGRKRKETGLHNRVPKHPARN

SEQ ID NO: 14671 - protein, 577 aa, Aphis gossypii
MTVEQIRSLLQDISTETDCVDDQESDSDLSIEDVEVSDHESNSEQDFSDNESDLETSLGDSTFYIGKDKITKWQLKEFTTSKIRQHNIVNVVPGPKECARNIVSEIDAFLKIIDLDMIDEIVTCTNMYISNMRQRVQYSRPRDCLDTSRCEILAYFGLLFLIGIKKAHHANVKELWSADGSGTEITRATMSYKRFLFLCRCLRFDDRGTRAERRVIDKLSPIRTTFDLFLKNINKNYNLSEYTTIDEMLHPFRGRCQWIQYIPSKPAKYGIKMFALCDAKTFYTSKIEIYVGKQPPGPYEVSNSPIDIVKRLVTPIENSKRNLTTDNWYTSIPLADYLLQKKITLTGTLKKNKREIPTEFLPHKKKEVGSSVFGFQKNKTLVSYVPRKNKAVILLSTMHHDSKIDVETRKPEIIIDYNCTKGGVDTVDKMCAAYSVSRITKRWPLVIFYSLMNIAGINAQVLFSYSKHNNAPKIRRLFLKTLAFDLMKEHLAFRAQISSLPSDISSFLKIKYAVPSTSDVSTTPPSKRGTCFECGRKKNAATSMKCTKCMRFVCKLHSKKIIICEKCSNNDDNGNSE

SEQ ID NO: 14672 - DNA, 2634 bp, Aphis gossypii
ccttccagcgggcgcgctgttgtaaataatacaacagttttatatttattggtttattcaatttttattctatttttatcttatcggcggtcatgggtattcctctataatgttattatctacgttttagactatttttgaagtgtttcagttcattgtattgcagacaatcgacgaagtacttatagtgttgtcacaaaatacaacacgcgccattccgtgtacctacgccaaacacaaaacgcgtgttcggtgtacgcatcgttcgtcgtatctgacttattattttgtaatttttatttttgtgtggtaataaaaacaaaaatatgtaagtattgttttatatcactatgcaatatataatatatacattttaatttttcttacaatatgttttttttattatttgtatacgccaaacacaaaacgcgtgttcggtgtacgcatcgttcgtcgtatctgacttattattttgtaatttttatttttgtgtggtaataaaaacaaaaatatgtaagtattgttttatatcactatgcaatatataatatatacattttaatttttcttacaatatgttttttttattatttgtatacgtttttggtacgtactaataatcgatattatttatacaatgtcttaggtcggatcatatgacagttgaacaaattcgaagtttactgcaagacatttcaactgaaacagattgtgttgatgaccaggagagtgatagtgatctaagtatcgaagatgtggaggtaagtgaccacgaaagcaattctgaacaagatttttcagacaatgaatcagatctagagactagtttgggggacagtacattctacataggaaaagataaaataactaaatggcaactaaaagagtttacaacttcaaaaattaggcaacataatatagtaaacgtagttcctggtccaaaggagtgcgctagaaatattgttagtgagatagatgcatttctaaaaataattgatcttgacatgattgacgaaatcgtaacgtgcactaacatgtatattagtaatatgagacaacgagttcaatactctagaccccgagactgcttagatacttcaaggtgtgaaatactggcttattttggacttttatttttgattggtataaagaaagctcatcatgctaatgtaaaagaattatggtcggcggatggttctggtacagaaataactagggccactatgagctacaaaagatttttgtttttatgtcgctgcctcagatttgacgatcgcggaactagagctgaaagacgggtgattgataaactgtctcctattcgtactacgtttgacctttttttgaaaaatatcaataagaattataatttgagtgaatatactactattgacgaaatgttacacccatttcgtggtcggtgtcaatggatacagtatatcccaagtaaaccggccaaatatggcatcaaaatgtttgcattatgtgatgcaaaaacattttacacgagtaaaatagagatttatgttggaaaacaaccacctggtccgtatgaggtttctaattcaccaattgatatcgtaaaacgattagtaacacccatcgaaaactctaaacgaaatcttaccactgacaactggtataccagtattccacttgcagattacttattacaaaaaaaaattactctaactggaactttgaaaaaaaacaagcgagaaatacctacagaatttttaccacataaaaaaaaagaagttggttcgagcgtgttcgggtttcaaaaaaataaaacgttagtgtcatacgtacctcgaaaaaacaaggcagttattttgctttcaactatgcaccatgattcaaaaattgatgtagaaactcgtaaaccagaaataattatagattataattgtaccaaaggtggagttgatacagtagataaaatgtgcgcggcatattctgtctctagaattacaaaaaggtggccacttgtaattttttattctttgatgaatattgctggaataaatgctcaggtactgttttcatactctaaacataacaatgcccctaaaattagaagattatttttgaaaacattggcatttgatctaatgaaggaacatcttgcttttcgagctcaaatctcaagtttaccatcggacatatcatcttttttgaaaataaaatatgctgttccaagtacatcagatgtatctacaacccccccttcaaaacgaggaacttgcttcgaatgcgggagaaaaaaaaatgcggctacatctatgaagtgcaccaagtgtatgcgatttgtatgtaagctacattcaaaaaaaattattatttgtgaaaagtgttctaataacgatgacaatggcaattctgaataatttcttactgtaaacaaatactaaaaataattttaatttttgatgtaataataataagacgtattgattttttaataaaacataattataatagtatttaaataaaaacaactttgtgaacgtacctattgtttattttattattagatataatatgtacgactatcacagcatattaggactgttgtaaaatttacaacgcgcgactactcttgtttcaaataatggcgcgcccgctggaagg

SEQ ID NO: 14673 - protein, 545 aa, Acyrthosiphon pisum
MISDEDILLHLDEIIANEDEFIDDINFDIENNDIEVTELEVTDPPSPDHSPIVQRNFRPKEHYFDSSKCGVQKHEFGLNSNSSKLEFFKAFVSEFLLGKVAFETNRYAKQYIQSNEISHQSRVNAWKDTNVDEMYTFLATTILMSRNKKLDMKDYWSTDPLLSSPIFRQIISRNRYLLLHQMLHFCNNENQEKGNRLFKLDVVLDEIRTNFKAGMVPFQNIVIDESLVLWKGRLSFKQFIKTKRHRFGIKFFVLCDVETDFILDFIIYTGTETRLLPYDANIGISGAVVKTLIAPYLNKGYNLYTDNWYTSPILAQYLYKKKTTITGTVRKNRRGMPELKNKLAVGDVQSAHSKNIMVLKWVDRREVFMLSTKFDSNLDNSGKFDRKGNLVKKPICVINYNQCMGSIDKTDMLLSSVECVRKTSKCILNAFSAFKTVTGQNMPLANFQLEVIRQLLEKYGGNTVSPRGRPCTKDQPFRLSARHFPSDVKKLASGKVQRRKCIVCTRNNKRKDTMYMCQECDVGLCATPCFAIYHTKQNYLAVQLF

SEQ ID NO: 14674 - DNA, 2476 bp, Agrotis ipsilon
ccctagaagcccaatctacgtaaatttgacgtataccgcggcgaaatatatctgtctctttcacgtttaccgtcggattcccgctaacttcggaaccaactcagtagccattgagaactcccaggacacagttgcgtcatctcggtaagtgccgccattttgttgtaatagacaggttgcacgtcattttgacgtataattgggctttgtgtaacttttgaaattatttataatttttattgatgtgatttatttgagttaatcgtattgtttcgttacatttttcatatgatattaatattttcagattgaatataaaatggagtcccgtcaacggctaaaccaggacgaaatagctacaattttagaaaatgatgacgattattctccactggattcggactccgaggcagaagatcgtgtagttgaagatgatgtctggagtgataacgaggacgcgatgatcgactacgttgaagatacaagcaggcaagaggaccccgataacaatattgcttctcaggaatcggctaatcttgaggtaacttcgttgacttcacaccgaataattagtttgcctcagcggtcaatatgtggaaaaaacaaccatgtatggtcaactacaaagggacgtacgacgggcaggacttctgctatcaatataatacgcacaaataggggaccaacgcgaatgtgtcgcaatattgttgatccattgctttgttttcaactttttataacggatgagataattcatgaaatagttaagtggacaaacgtcgagatgatagtaaaacgtcaaaatttgatagacatttcagcaagctacagggatacaaatacaatggagatgtgggcgttagtcggcattctcactctgacggcagttatgaaagataaccacttatcaactgatgagttgtttgacgctacattctctggcaccagatacgtatcagtaatgagccgagagagattcgaattcctaataagatgtatgagaatggacgacaaaacactgcgaccaactcttcgtagcgatgatgcttttataccggtgagaaaactatgggagatttttatcaatcaatgcagactaaactacgttcctggcggtaacttgactgtagatgagcaattgttgggttttcgcggccgttgtccattccggatgtatattcccaacaaacctgataaatatggcataagattccccatgatgtgtgacgctgccacaaagtacatgatagatgccataccgtaccttggtaaaagtacaaaaacaaatggtttaccactgggcgagttttatgtaaaagagctgactaaaacagtacacggcacaaatagaaatgttacctgcgacaactggttcacgtctatcccattagcgaagaacatgctccaggctccatacaacctaacaatagtaggaaccatcaggtctaacaaaagagaaatacctgaagagatcaagaattctcgatcacggccggtaggatcctcaatgttttgctttgatggccctttgaccttggtttcgtataaaccaaagccgtcaagaatggtatttttattgtcttcctgtgatgaaaatgccgttatcaatgaaagtaacggaaaaccggacatgatattgttttataatcaaacaaaaggcggtgttgattcctttgaccagatgtgtaagtctatgtctgctaacaggaaaactaataggtggccgatggcggtcttttatggcatgttgaatatggcgtttgtgaattcctatataatatactgtcacaataagataaataaacaaaaaaaaccgataaaccgcaaagaatttatgaaaaatttaagtacagatctgacgacaccttggatgcaagaacgactaaaagcacctactttgaagaggactctacgcgacaatataacaaatgttttaaaaaatgtggtaccgccatctccggctaataatagtgaggagccaggaccaaagaaacgaagctattgtggattttgttcatataaaaaaaggcggatgaccaagacgcagttttacaaatgcaaaaaggctatatgtggagaacacaatattgacgtttgtcaagactgtgtataaagactgttttttttaaaaggcttataaagtattactattgcgtgatttaattttataaaaatatttaaaaccagttgatttttttaataattacctaattttaagaaaaaatgttagaagcttgatatttttgttgatttttttctaagatttgattaaaaggccataattgtattaataaagagtatttttaacttcaaatttattttatttattaattaaaacttcaattatgataatacatgcaaaaatatagttcatcaacagaaaaatataggaaaactctaatagttttatttttacacgtcatttttacgtatgattgggctttatagctagtcaaatatgattgggcttctaggg

SEQ ID NO: 14675 - protein, 505 aa, Chilo suppressalis
MIQGQIMVSDTEEEPSDSTGRTKRRRTYAWRKRDLAKNPVNWPDVQGACQDKRPIEWFENFLDEDVISLLVSESNKYAVKKNLPGDITTEDMKCFIGILLVSGYSWLPRRRMYWENSPDTKNELISSAMTRDRFDFIFRHLHVNDNLDLQDKYTKVRPLVTLLNKKFLEFSPLEEHYSVDEAMIPYYDRHGCKQHIKGKPIRYGFKAWVGATRLGYVLWMEPYQGATTMCNPIYKELGLGASVVLTFCDVLISRGFDLPYHVVFDNFFTGTPLLEEITKKGLRCTGTVRENRTSSCPLITSKLLKKKERGAVDYRTTHDNTFIIAKWHDNNIFSIASNAVGINPKQSAKRFSQSEKRNIVIEEPHMVSIYNKYMGGVDRSDENISHYRIGIRGKKWYMPLLTHMIDLAEHNAWQLYKINHGKLDHLGFRRRVAIALIESNRKNAKRGPSRPSHHEHADSRKDQMNHLVIPQSKQTHCRQCHKKCLTRCKKCDVGVCVKCFETYHS

SEQ ID NO: 14676 - DNA, 2406 bp, Chilo suppressalis
cccagattagcctactgtcctatatttaggacagtagaaataaaaaaaaatatcagaataccctctttatctaagattatttagtcttatgatttgcagtaagaaacgtgtcagctttattagaaaaaataaaaagacagttattttaacagtttttaccttataagtgtgtaataaaagtgcgttgcagacatggcaaatgacaggtatgtataaaaagttatattttactcgtgagttgtttttttctgtgttaatatctagttgataaccttaacttttgtactaaataaatattctagcaaaataatataaataaattacgtataacttgttacaaatactagcgtactatatataggacagtaggataatatacatgattttagtacaataatacaactttttctttacagaccgttagctgcgcatgaaattttagatgctttagaaaatgtttctgataatgaagaagattatagagaacgactgatatgtattctacctcctcctgttgatcctgcctgtctcactgacgaagattcgggtgaataagataatgtaactttgaataatttgccacgaaacattctgcttcaaccggctgaagtaatgattcaagggcagattatggtgagtgatacagaagaagaaccttctgattctacaggtcgaactaaacgtaggcgtacctacgcatggagaaaacgggacttggcaaaaaatcccgtgaattggccagatgttcaaggcgcttgccaagataagcgcccaattgagtggtttgaaaacttcttagatgaagatgttatttcgttgttggtgtcagagagcaataaatatgctgtcaaaaagaatttgcctggagacataaccactgaagatatgaaatgtttcatcggcatattgttggttagtggttattcatggctcccccgtagaagaatgtattgggaaaactcccctgatacaaagaatgaattgatcagctcggctatgactagggatagatttgactttatttttcgccaccttcatgtcaatgataatctggatttgcaagacaaatacacaaaagtacgccccctagttacacttctaaataaaaagttcttagagttttctcctcttgaagagcattacagtgtagatgaggccatgatcccctactatgatagacatggctgcaaacagcacataaaaggtaaacctattaggtacgggttcaaagcttgggttggtgctacacggttagggtatgttttatggatggaaccataccaaggtgctacaactatgtgcaatccaatatataaagaattggggctgggtgcaagcgttgttctcactttttgcgatgtgctgatttcacgtggcttcgaccttccttaccacgtagtttttgataatttttttactgggacgcccttgctggaagagataacaaagaaaggccttcgttgcactgggacagttcgagaaaacaggacatctagttgtcctctgattacatcgaagttactgaaaaaaaaggaacgtggtgctgtcgattacagaacgacacatgacaacacgttcattattgctaaatggcatgacaataatatattcagtattgcttctaatgctgtaggaataaatcctaaacaatctgccaaacgcttctcacaaagtgaaaagagaaacattgtcatagaagaaccacatatggtgtccatctataacaaatatatgggaggagtggatcggtctgatgaaaatatttcacattaccgaattggtatacgaggtaagaaatggtacatgccgttgctcacacacatgattgatcttgccgaacataatgcatggcagttatataaaataaatcatggaaaactggatcatcttggctttcgcagaagggtagcaattgctttgattgaatcaaacagaaaaaatgccaaaagagggcctagccgaccctcccatcatgaacatgctgatagtcgtaaagaccaaatgaatcatctggttattcctcaatcgaagcaaacacactgtcgtcaatgtcacaaaaaatgtttgacacgttgcaagaaatgtgatgttggagtgtgtgtcaagtgttttgaaacatatcattcataaatagtgttaatctagtaaattacatataacaatgggtaatataatcaatagttatctaataaactacactttttgattacattctgttttgtcataaatggtcttttatttcctcttattatcctactgtcctacatataggacggctgtttccctgaaagccttacacttaatttttttttcataattttttttatgttgcataagatctaataaactaaataatgtaacttttttgaaaattttcagaaaattttagtttcaggcttatctggg

SEQ ID NO: 14677 - protein, 622 aa, Drosophila melanogaster
MSSSGRKRKQQLKPRQDDHRSPVKRRSVDIKSEPLDGYPALADYDLSTADIKPDLTELQLQLVAEQQAASNTIRLELEQQESDSDEDGYSELDYQAEDVFCQDDMDDYDPDWSSQQTGSRLLFKFPIQQSGLKFGQRFQGPQHYFNQVLGNRSKFFSSLAQSCNLKGGELKSNPTTAEEMEIFMALSLLMCDLKLEHLSDYWSTNMFYGLVGFSGKIPLERYQQLLHCLNFDAPQLQAGRAKVKNSLLLDFINERMEEIYICGQQLVLNEPITLWKGALRYQDELPNKFRTNALLLHMLTEQSGLVVKILPEIVRKEDAPAWVRNSRQLVEHRNKIVLKLMEGYHGGRTVYTSKFYGSYGLAQELAKKSTYCTGLLDRNRYGNSKALVHQRLDSNSISTSYATSLMMAKWRRRAKSLYCFSSDCLAIYSKEMAMQKTNAKPKLIQELEFQLRPGNDGRHHLIHYQAACKELKANIKLTIFLLNILVYNAYLLYFANGQNARVGHLKSYSEFRVIIIKSLLREEVTNEPVTSIQKPETYERSKNKPVPEPRLKTILHEPMLIQQNGKPAKKNCRYCHKGGMLQFSRYMCNTCPDKPGLCQEPCFLLWHEQLKKVIRQTIGRSE

SEQ ID NO: 14678 - protein, 581 aa, Heliotis virescens
MSKMASKRLSNTQIVDVLEDDEECIIDSPDEDEVDAEVIQSDHNSESQESANEIDSEWSDTDNEPLSRLASEDSDNFYFSKNKCTKWAKEPPRTSVRVRRHNIMRETPGPKGRAKEIQTISEAFFCMFSMDTVNLVLQQTNDYIKSIQEKFQRERDCKVLEYEELLAYLGLLYMSGVLRSSHLNFKDLWATDGTGIEFFQNTMSFNRFLFISRCVRFDDKNTKSERLKTDKLAAVREFTDLMNNNFINNYCASENVTLDEQLPAFRGRFSGVVYMPNKPTKYGIKHYALVDSATFYLLKFEIYAGVQPEGPYRMPNDTVSLVKRMTEPIWGTGRNVTMDNWFTSVPLANILLKDHQLTMVGTIRKNKPEIPTCFQPKRTRTEHSSLFGFQEDVTLCSYVPKKSKAVLLISSMHNDNNIVESEKKKPEIILYYNSTKGGVDTNDQMCANYNVGRRTKRWPMVIFYHLLNVAGINAYVIFKNKIDHGISRREFLKHLAVDLVKVHQQTRSNIPQLPRAVQKRLKRNAEVQDPGSTSRGGPSTSYKRCHICPRSKDKKIRFMCAKCHHHICHDHSTMICDKCID

SEQ ID NO: 14679 - protein, 594 aa, Macdunnoughia crassisigna
MGSSINDEHILSALLQSDDELVGEDSDSEISDHVSEDDVQSDTEEAFIDEVHEVQPTSSGSEILDEQNVIEQPGSSLASNRTLTLPQRTIRGKNKHCWSTSKSTRRSRVSALNIVRSQRGPTRMCRNIYDPLLCFKLFFTDEIISEIVKWTNAEISLKRRESMTGATFRDTNEDEIYAFFGILVMTAVRKDNHMSTDDLFDRSLSMVYVSVMSRDRFDFLIRCLRMDDKSIRPTLRENDVFTPVRKIWDLFIHQCIQNYTPGAHLTIDEQLLGFRGRCPFRMYIPNKPSKYGIKILMMCDSGTKYMINGMPYLGRGTQTNGVPLGEYYVKELSKPVHGSCRNITCDNWFTSIPLAKNLLQEPYKLTIVGTVRSNKREIPEVLKNSRSRPVGTSMFCFDGPLTLVSYKPKPAKMVYLLSSCDEDASINESTGKPQMVMYYNQTKGGVDTLDQMCSVMTCSRKTNRWPMALLYGMINIACINSFIIYSHNVSSKGEKVQSRKNFMRNLYMSLTSSFMRKRLEAPTLKRYLRDNISNILPNEVPGTSDDSTEEPVTKKRTYCTYCPSKIRRKANASCKKCKKVICREHNIDMCQSCF

SEQ ID NO: 14680 - DNA, 2472 bp, Macdunnoughia crassisigna
ccctagaaagatagtctgcgtaaaattgacgcatgcattcttgaaatattgctctctctttctaaatagcgcgaatccgtcgctgtgcgtttaggacatctcagtcgccgcttggagctcccgtgaggcgtgctcgtcaatgcggtaagtgtcactgattttgaactataacgaccgcgtgagtcaaaatgacgcatgattatcttttacgtgacttttaagatttaactcatacgataattatattgttatttcatgttctacttacgtgataacttattatatatatattttcttgttatagatatcgtgactaatatataataaaatgggtagttctataaacgatgagcatatcctctctgctcttctgcaaagcgatgacgagcttgttggtgaggattctgacagtgaaatatcagatcacgtaagtgaagatgacgtccagagcgatacagaagaagcgtttatagatgaggtacatgaagtgcagccaacgtcaagcggtagtgaaatattagacgaacaaaatgttattgaacaaccaggttcttcattggcttctaacagaaccttgaccttgccacagaggactattagaggtaagaataaacattgttggtcaacttcaaagtccacgaggcgtagccgagtctctgcactgaacattgtcagatctcaaagaggtccgacgcgtatgtgccgcaatatatatgacccacttttatgcttcaaactattttttactgatgagataatttcggaaattgtaaaatggacaaatgctgagatatcattgaaacgtcgggaatctatgacgggtgctacatttcgtgacacgaatgaagatgaaatctatgctttctttggtattctggtaatgacagcagtgagaaaagataaccacatgtccacagatgacctctttgatcgatctttgtcaatggtgtacgtctctgtaatgagtcgtgatcgttttgattttttgatacgatgtcttagaatggatgacaaaagtatacggcccacacttcgagaaaacgatgtatttactcctgttagaaaaatatgggatctctttatccatcagtgcatacaaaattacactccaggggctcatttgaccatagatgaacagttacttggttttagaggacggtgtccgtttaggatgtatatcccaaacaagccaagtaagtatggaataaaaatcctcatgatgtgtgacagtggtacaaagtatatgataaatggaatgccttatttgggaagaggaacacagaccaacggagtaccactcggtgaatactacgtgaaggagttatcaaagcctgtgcacggtagttgtcgtaatattacgtgtgacaattggttcacctcaatccctttggcaaaaaacttactacaagaaccgtataagttaaccattgtgggaaccgtgcgatcaaacaaacgcgagataccggaagtactgaaaaacagtcgctccaggccagtgggaacatcgatgttttgttttgacggaccccttactctcgtctcatataaaccgaagccagctaagatggtatacttattatcatcttgtgatgaggatgcttctatcaacgaaagtaccggtaaaccgcaaatggttatgtattataatcaaactaaaggcggagtggacacgctagaccaaatgtgttctgtgatgacctgcagtaggaagacgaataggtggcctatggcattattgtacggaatgataaacattgcctgcataaattcttttattatatacagccataatgtcagtagcaagggagaaaaggttcaaagtcgcaaaaattttatgagaaacctttacatgagcctgacgtcatcgtttatgcgtaagcgtttagaagctcctactttgaagagatatttgcgcgataatatctctaatattttgccaaatgaagtgcctggtacatcagatgacagtactgaagagccagtaacgaaaaaacgtacttactgtacttactgcccctctaaaataaggcgaaaggcaaatgcatcgtgcaaaaaatgcaaaaaagttatttgtcgagagcataatattgatatgtgccaaagttgtttctgactgactaataagtataatttgtttctattatgtataagttaagctaattacttattttataatacaacatgactgtttttaaagtacaaaataagtttatttttgtaaaagagagaatgtttaaaagttttgttactttatagaagaaattttgagtttttgtttttttttaataaataaataaacataaataaatggtttgttgaatttattattagtatgtaagtgtaaatataataaaacttaatatctattcaaattaataaataaacctcgatatacagaccgataaaacacatgcgtcaattttacgcatgattatctttaacgtacgtcacaatatgattatctttctaggg

SEQ ID NO: 14681 - DNA, 2464 bp, Pectinophora gossypiella
ccctagataactaaacattcgtccgctcgacgacgcgctatgccgcgaaattgaagtttacctattattccgcgtcccccgcccccgccgctttttctagcttcctgatttgcaaaatagtgcatcgcgtgacacgctcgaggtcacacgacaattaggtcgaaagttacaggaatttcgtcgtccgctcgacgaaagtttagtaattacgtaagtttggcaaaggtaagtgaatgaagtatttttttataattattttttaattctttatagtgataacgtaaggtttatttaaatttattacttttatagttatttagccaattgttataaattccttgttattgctgaaaaatttgcctgttttagtcaaaatttattaacttttcgatcgttttttagatggatttgagaaaacaagatgagaaaatacgtcaatggcttgagcaagatattgaggaggacagtaagggagagtcagacaattcaagttcggaaacggaagatattgtggagatggaagttcacaaaaatacgagcagcgaatctgaagtttccagcgagtccgattacgaacccgtttgcccaagtaagagacagagaacgcaaattattgaatcagaggaatctgataactccgaaagtattcgcccaagcagaagacagacaagtcgggttattgattcggacgaaactgatgaggatgtaatgagctccactcctcagaatatccctcgtaatccgaatgttattcagccaagttccagattcctttatggtaaaaataaacacaaatggtcgtcagcagccaaaccatcttctgtgcgaacttctagaagaaacatcatacattttataccaggaccaaaagaaagagcaagggaagtttctgaaccaattgatatattttccctgtttataagcgaagatatgttgcaacaagtcgtgacatttactaatgcagagatgcttattagaaaaaataagtataaaaccgagacgtttactgtatctcctaccaatttggaagaaataagagctttgcttggtttattgttcaatgcagcagctatgaaaagtaatcatttaccaactcgcatgcttttcaatactcatcgatcaggaacgattttcaaagcttgtatgagcgcagaacgattaaattttcttatcaaatgcctccgatttgatgacaagcttacaagaaatgtaagacagcgagatgataggtttgcacctatacgtgacttgtggcaagcattgatatctaactttcagaaatggtacactccagggtcctatattaccgtagacgaacagctggtcggatttcgaggaagatgttcatttaggatgtatattccaaacaagcctaataaatacggaataaaacttgttatggctgcagatgtaaacagcaaatatatagtgaatgccattccgtacttgggaaaaggaactgatcctcaaaatcaaccgttggctacgttttttataaaagaaataacgtctacattacatggcacgaatcgaaacataaccatggacaactggttcacgtctgttcccttagctaacgagctgttgatggcaccttataatttgacattagtgggaactctaagaagtaataaacgagaaattcctgaaaaactcaaaaattctaagtcacgcgcaattggtacttcgatgttttgttacgatggtgataagacattagtttcatacaaagccaaatctaataaagttgttttcatcttgtctacaattcatgatcaacctgacatcaatcaagaaacaggaaaaccagaaatgattcatttctacaacagtacaaagggtgcagtagataccgtggaccaaatgtgctccagcatttccaccaacagaaaaacccaaagatggcctttgtgcgtgttttataacatgttgaatctatcgattatcaatgcgtacgttgtatacgtttataataatgttagaaataataaaaaacctatgtctcggcgtgacttcgttataaaactaggagaccaacttatggagccctggctgcggcagcggttgcagacggtgactttgagacgtgatatcaaggtcatgatacaagatatcttaggggagtcttctgatctagaagcccctgttccttctgtgtctaatgtgcgtaaaatctactacctatgtccttccaaagcccgaagaatgacaaaacaccgatgcattaaatgcaaacaggctatttgcgggccccataatattgacatatgtagtcgctgtattgaatagtttcactaagtaattttgttcctatttagtagataagtaacacataattattgtgatattcaaaacttaagaggtttaataaataataataaaaaaaaaatggtttttatttcgtagtctgctcgacgaatgtttagttattacgtaaccgtgaatatagtttagtagtctaggg

SEQ ID NO: 14682 - protein, 449 aa, Tribolium castaneum
MDIFRLVDLAAAYDGTATGFEIDVWRPTMNTTNVYPVHAIKMAENDNYVGLSKEEVSALKELITTAESEEDSDIETELENVNDCWSTDPLLHTPIFSKVMPRDRYLLLLRLLHFCDNTKQKKGERTFKIDLVMSFLSNRFKVLFTPFENLCIDESLVLWKERLSFKQYIKSKRHRFGVKMFVLCNVETDYILGFIVYTGSQTKIKPSDLGISGSVVLTLLEDYLDKGHNLYIDNWHSSPELALHLYQHKTNVCGTVRTNRRHMPKLPDPKVKGDIESQHTAEMMTGKVDRTSKEEVKKPTCIVDYNANMGSVDKVDMLLSSVECLRKTIKWYKKIFFHLVDLCMINAHAMYKLEVIRQIVKKYAKIQKTSKKGRPSSGDNPLRLIGRHFPQKIPPVPGGKKTCQRICFVCKHTQRGVSRRRDTSYQCAECDKALCLIPCFEVYHTKQIF

SEQ ID NO: 14683 - protein, 487 aa, Daphnia pulicaria
MQKKADAKKVAQHKAANRNWKECKVWGDVGRQSRADDDSPRPQFQERAIQFAPLEEPGPVLSQFNRFSNPLGVFKSMLGGEDTLYLLREATNDYIAEFWSSRKTPPSRKVGGKPEGRLIGPRLPAGGFVTDHELVAFFGIQFLIGYHRLPELSMFWEQQPDAGLGLGIIQQAMTRERFKFISKHIACASPWDDVDPNSDDPDQEPERPDPIRKIRPLVKRLNERYHACRKPPRGQSIDESMVKFKGRSVLRQTMKNKPIKSGFKIWSRCCHRGYTYKFEIYQGARFGEKQGRSRNNEAVERVVVDLCQPLTDQGFVVAFDRFFTSIALLDKLRENGVNAVGTILPSRVNQPIMTKNESNLRPDEFAAKFGGEPGTCRKGIFVWRDTKAFRVASNYHGSNLVKVRRKQRDGSFKTKSCPKAIDDYVNNMGGVDTANQLRSYYERDRKAKKWWHRLLYSLLETCLVNSWICFNDMVRSQMAEIKTSNTQ

SEQ ID NO: 14684 - protein, 585 aa, Homo sapiens
MSNPRKRSIPMRDSNTGLEQLLAEDSFDESDFSEIDDSDNFSDSALEADKIRPLSHLESDGKSSTSSDSGRSMKWSARAMIPRQRYDFTGTPGRKVDVSDITDPLQYFELFFTEELVSKITRETNAQAALLASKPPGPKGFSRMDKWKDTDNDELKVFFAVMLLQGIVQKPELEMFWSTRPLLDTPYLRQIMTGERFLLLFRCLHFVNNSSISAGQSKAQISLQKIKPVFDFLVNKFSTVYTPNRNIAVDESLMLFKGPLAMKQYLPTKRVRFGLKLYVLCESQSGYVWNALVHTGPGMNLKDSADGLKSSRIVLTLVNDLLGQGYCVFLDNFNISPMLFRELHQNRTDAVGTARLNRKQIPNDLKKRIAKGTTVARFCGELMALKWCDGKEVTMLSTFHNDTVIEVNNRNGKKTKRPRVIVDYNENMGAVDSADQMLTSYPSERKRHKVWYKKFFHHLLHITVLNSYILFKKDNPEHTMSHINFRLALIERMLEKHHKPGQQHLRGRPCSDDVTPLRLSGRHFPKSIPATSGKQNPTGRCKICCSQYDKDGKKIRKETRYFCAECDVPLCVVPCFEIYHTKKNY

SEQ ID NO: 14685 - protein, 409 aa, Mus musculus
MPPSASAVDFFQLFVPDNVLKNMVVQTNMYARKFQERFGSDGAWVEVTLAEMKAFLGYVISTSVSHCESVLSIWSGGFYSNRSLALVMSQARFEKILKYFHVVAFRSSQTTHGLYKVQPFLDSLQSGFDAAFRPSQTQVLHEPLIDEDPVFIATCTERELRKRKKRKFSLWVRQCSSTGFIIQIYVHLKEGGGPDGLDALKNKPQLHSMVARSLCRNAAGKNYIIFTGPSITSLNLFEEFEKQGIYCCGLLSSRKSDCTGLPPSMLTNPATPLARGQHQIRTKGNMSLICWYNKGHFRFLTNAYSPVQKGVIIKRRSGEIPCPLAVEAFAAHLSYICRYDDKYSKYFISHKPNKTWQQVFWFAISIAVNNAYILYKMSDAYHVKKYSRAQFGERLVRELLGLEDSSPAH

SEQ ID NO: 14686 - protein, 704 aa, Macaca fascicularis
MRPEAEGDSEGEESEYFPTEEEEEEEEDDEVEGVEADLSGDGTDYELKPLPKGRKRQKKVPVQEIDDDFFPSSGEEAEASPIGEGGGGGRKVGRYRDDGDEDYYKQRLSPKMPRTLSLHEITDLLETDDSIEASAIVIQPPENATAPVSDEESGDEEGGTINNLPGSLLHTAAYLIQDGSDAESDSDDPSYAPKDDSPDEVPSTSSVQQPPPSRRRKMTKIVCKWKKADLTVQPVAGRVTAPPNDFFTEMRTPTEILELFLDDEVIELIVKYSNLYADSKGVHLGLTSSEFKCFLGIIFLSGYVSVPRRRMFWEQRTDVHNVLVSAAMRRDRFETIFSNLHVADNADLDPVDKFSKLRPLISKLNERCMKFVPNETYFSFDEFMVHYFGRHGCKQFIRGKPIRFGYKFWCGATCLGYICWFQPYQGKNPNTKHEEYGVGASLVLQFSEALTEAHPGRYHFVSNNFFTSIALLDKLSSMGHQATGTVRKDHIDKVPLESDVALKKKERGTFDYRIDGKGNIVCRWNDNSVVTVASSGAGIHPLCLVSRYSQKLKKKIQVQQPNMIKVYNQFMGGVDRADENIDKYRASIRGKKWYSSPLLFCFELVLQNAWQLHKTYDEKPVDFLEFRRRVVCHYLETHGHPPEPGQKGRPQKRNIDSRYDGINHVIVKQGKQTRCAECHKNTAFRCEKCDVALHVKCSVEYHTE

SEQ ID NO: 14687 - DNA, 2511 bp, Macaca fascicularis
ttggcagatcaagcaaaactgtcttttgaaaggaaggagcaagctacttgtaataaaagaccagctagaaaagctccagcctcagtcacgcctccggccccaacacaaagtaaaaacaaaccaaacaagaaagccaaagttctgtccaaaaaagaggagcgtttgaaaaagcacatcaagaaactccagaagagggctttgcagttccaggggaaagtgggattgccaaaggcaaggagaccctgggagtcagacatgaggccagaggcagagggagactctgagggtgaagagtctgagtatttccccacagaggaggaggaggaggaggaggaagatgacgaggtggagggggtggaggcagacctctctggagacggtactgactatgagctgaagcctctgcccaagggccggaaacggcagaagaaagtcccagtgcaggagattgacgacgactttttcccaagttctggggaagaagctgaagcttctcctataggagaaggaggaggaggaggtcggaaagtaggaagataccgagatgatggagatgaagattattataagcagcggttaagtcccaagatgcctcgaacactaagtttacatgaaataactgaccttttagagacagatgacagcatagaagcaagtgctatagtgatacaaccacctgaaaatgctacagcacctgtttcagatgaggaatcaggagatgaagaaggtggaacaataaataatctgccaggttctttgttgcacacagctgcgtatcttattcaagatggctctgatgctgagtctgactcagatgatccctcatatgcacctaaagatgactctcctgatgaagttccatctacgtcttctgtgcagcaacctccaccatcaaggaggaggaaaatgacaaaaattgtttgcaaatggaaaaaagccgacctaactgtacaacccgtagcaggtagagttacagcaccaccaaacgatttcttcaccgaaatgagaactcccacagaaattcttgaactttttcttgatgacgaggtcattgaactcattgtcaagtactccaacttatatgctgacagtaaaggtgtacatcttggcttgactagctctgaattcaaatgttttctgggaattatttttctgagtggttatgtttcagttcctagaaggcgtatgttttgggaacaaagaacggatgtgcataatgtactggttagtgctgccatgagacgtgaccgatttgaaactatattttctaatttgcatgttgctgacaatgcagatttggatccagtggacaaattttccaaattgcgacctctcataagcaaactcaatgagagatgcatgaaatttgttccaaatgaaacatatttcagctttgatgaattcatggttcattattttggtcgtcatgggtgcaaacagtttattcggggaaagcccattcggtttggctataagttttggtgtggtgccacctgtctgggctacatttgctggtttcagccgtatcagggtaaaaacccaaatactaaacatgaggaatatggtgtcggtgcgtcacttgtccttcagtttagtgaggcacttacagaggcacaccctggacgataccattttgtatccaataactttttcaccagtattgcacttcttgataagctcagttcaatgggacatcaggcaacaggtacagtgagaaaggatcacattgacaaagttccattggaatcagatgtagctttaaagaaaaaagaaagaggcacatttgattatcgaattgatggcaaaggcaatattgtctgcagatggaatgataacagtgttgtcactgttgcctcatctggtgctggtatccatcccctgtgtcttgtcagtcgttattcccagaaattgaaaaagaagatccaagttcagcagccaaacatgatcaaagtgtataaccaattcatgggaggcgtagacagagctgatgaaaacattgataagtatcgggcctcaatccgtggaaagaaatggtattcaagccctcttttgttctgtttcgaattggtcttacaaaatgcttggcaattgcataaaacatatgatgagaaaccagtggattttctggagtttcgtcgacgtgtggtatgccattatctggagacccatggtcatcctccagaacctggccaaaaaggaagacctcagaagcgtaacattgactcccgttatgatggcataaatcatgtgatagtcaaacagggaaagcaaacgcggtgcgctgaatgtcataagaacaccgcttttcgatgtgaaaaatgtgatgttgccttacatgtgaagtgttccgttgaatatcacactgaatagcaggtgtcaccacctcctgagacaagaaacataattttatacattatgtacagtggttttgcctagtgttccaattttggaacgtcacataacaatggaacataataaattttttttatcttcaaaaaaaaaaaaaaaaaa

SEQ ID NO: 14688 - protein, 591 aa, Rattus norvegicus
  misc_feature (382)..(382): Xaa can be any naturally occurring amino acid
MSHTDLHGRWFVLCDESVDAVSYACPMRFLLVSESQCPFEGDDPARGGAHSKVRSPKLLKVLSALEEGESGSNREEIFIAPPNNASEDLTDEDSGEEDSDQNSAQLPGWVLRASVLFIVNETNRYARQKNITLDLTVQELKRDRFELIFSYLHFVDNSEPDESDSFAKGTLFTKDRGLDVGASMVVRFVDALQECGCLPCHIFLDKVFTSVKPMSILREKGVKATGTVCEYRTECCPLKDAKELRKMRKGSFDYRVDESQEIIVCRWSNSHVVNICSNAVGIEPARGVGRMDQNIAKYKVKIRGMKRYLSFIGYIIDAALNNAWQLHRVCCQDGHVDLHSFRSYVARVYLESNVDTSSPGRRSRWVETENRFNMIGHWIVHXDKRTQCALCHSQTNTCCEKCQKGVHTFSSYSDITRNTFRWPVRRDRDVGKETFTQAWGGGAGKTQSQLLSKVDDIKQSLDIIHTQRAPESLKIRDPVTRGRDCIEQRGLRMQVLVSHRQHSRVPSRRELEEAVALGLALSLTLMCAQQNEDPSNKIKQQKKTERKHRHVVATSIHILEPGQKAVSSVPETGPMIVSDLPCVATNVQTPR

SEQ ID NO: 14689 - protein, 581 aa, Ciona intestinalis
MAVKGVSADETIWSFLEAESEKDKGDAAYACSSDESDILMDEFNATSSKNVDAPNHCCLSSDDETTVHTSSKLQKLLNDRSKSKRTVQQTHLEELSAEDSMEDWVRIVTDYYPEDHNLRETVMESGMDGVTPLDYLAMFLSAEFWDLLVTETNRHAAQTLRKKKLKKGSNLRTWKDTTVAEMKAYFAILLSMGLCNTVDMQDYWSASWITVTSSISKIMSRVRFTLIRAMLHFCNDEESSSKNSQKHNRLFKVRQLIDVLVPKFSALYKPDKELAIHEMTVACNYKSEQRVRKKPIQWTDKVYALTEARTGYLLEWAIHAGSSRETEKGASIVRKLCTRYIGKHDIYINTANSYTNRNLAKEFVSQTNGSGGIPGELKTINEKNNPVCAKSAVRSSEIKAKSATQKGNKRSYNDMKKANSKKRYNYLSGVIPIFRQLNLFRHKTVKWSLRIFENLAQICVVNSYILYTSKTSDSSDKMDLKKYIEACVSGLLVDYNPHITEKWRPPQPGTVLSRILPPQYVHKIIKIDKKPQCVVCSDSRRKLGRRQTSFMCEKCNVALCVVPCFHRYHTLKNYRVCHLDM
